United States Patent Application Publication US 2025/0051766 A1 - sequence listing, part 13

SEQ ID NO: 5065 - DNA, 58617616 bp, Homo sapiens (residues 23,881,254-26,052,276 of 58,617,616)
  source 1..58617616: mol_type = genomic DNA
aggaggagaaggagtaggaggatagaaggaggagaaaaagaggagaggagaatgaggagaaagaggaggagataagaagagaaggagtgagggaggagtaggagaagagaagtaaaaggagagaagaaggaagagaggagaagaaaaaagagaaaaggaggaagagagaaggaggagtaggagaggaaaaaagaataggaggaggaagaagaggaggggaggagaagggggaggagggaaggggaagagaagaagagaagaaaaaggagatggaggagaggagaaaaaagaaaaaggcagcgagaagaaggagaagaggagaagaaggggaggaggatgaaggaagaaagaaagggaggaagaggagagaagaaaaagtaggatgaagagaaggaggaggtgaagaggagaaggaagaaaaaagaaagaggaagagagaagaaaagggggagaggtgaggaggaggagaaaaggagaaggagaggaggagaaaaaggaaaggaggaagagaagagaaggttaggaggagagaaagaaaaggtgaaggagaggaggagaaaaaggataagagaaggaggaagaggaggggaggagaaggaggaggaagagggggaacaggaggagagagaaagaaggaggtggaggagaggagaaaaagggaaaggaggtggagaggaggagcggaggaagaggaggaagaaaggagaaggagaaaaggaggaagaggaggaagaaaggagaaggagaaaaggaggaaaaggaggaagaggagagcagaaggaggaagagaggaggaggagtggaggggtaggaggagaagaggaggaggaagagagaagtaggaggaggaagaggaggagagaaggaggataagagaagatggatgagaaaaggaggagaggaagagaaaaagaggaggaagaggataggaggaggcggagaggagaaggatgagtaagagaggaagagaagagaaataggaggaagaggacaggcggagtaggaaaaggagggaaggaaaaggagtaatagaacaggaggaagaggaggagaagagaaggaggagaagagaaagaggagaagagaaggaggaggagaagagaaggaggaggagcagaggagaatatggaggaggaaagaaggagaagtagaaggaggaaaagaggagaaaaaaggaaggaaaaggaggaagaggagaggagaggagaaggaggaggagagtaggaggaggagaagaggaggaagaggaggagaggaggaggaaaagagagggagtgcctggtctgtcccacggaccctggctgagcaacggatgaaaggagtactcagacacaggtacacagtgttagagcaactaggggtctgcctggctctagtggccaaagtgcagccccaagaagcttgagctgcttgcttttgttcagtgcaggcacaatgccaaaagccttgagcaaacacagtctgtagataattaacaattattgtttccatttcagggaacgtcacacgcgaggatgttcagaggtcagttcagggacaacttcagacaaacaagcctgatcaagacaacttattcctcactcttttgaacatacttctcaccctattcttcagggttagagaacagcagtcttcagctattctctcccaaagctactcaaagtcttttgacctttcagaaggcctgctcccttcttctacagtttttcccaccactctgactgacctctcacatctccccattttctgtttttttttttcatcaggttttgttgattgaagagtacagatgtgtgcagcaacaggtttgacaggcgcagctgttacagcttgtgttttggctttgcatgctagaattagtaaataacataagataaacatgagtataatcagtaatattctttcccaatcaaagagtgacccgcaggaatggggatctatccaggagagatgtttttgcacattgttatatagggctgttaatgagaaaccccaccatgggtatgttaatctcttctagccaggtagtcacattgttaaaagctgggaaaggggtgtctgcccaggtaatagggtggaagaaaggtggatctagaaggtgggcctaatagagtgtagcaggtatgggttgcaggcagagtgagagaataagaaaaactaataccctacaagagttgcaatgtacaacagacagcatagcaaggaagattatctggagtgaatggtgtttttgtctggagcagaatttgctcagtctcctgagttgtctttttcagcataatgtccagggcctgtattgtctgaggaagccacatcatctggggctgtgggtccagcagggttattttatttttggtaccaggtttggtttcagccacatcgtagtatgacttgatgcatcacactagaatccaaagaggacctgagggaaagtgaacacaagcatatcatcttcccctgttaacaaatcatttggaccacaccatacattactatttacatctttccataaaattgaaggttttatatcttgaatgatttttgcaaagtgctttattatagctgattgaaatttatcatctaaatttaagaaattaagggtaaataaggcttgtgccaatagtattgcagggttgttactcatatcccaccttttttgttttctgagcatatttttaagggtggagtgggcacgttctactatggcttctccttgggagatatacaagacacccatggaatgttggatgttccatttgtgacaaaattgttgaaattgtgagctggtgtaagctggaccattatcagttttaattttttgggccaccccatgaatgcaaaagttaaaagaagaggtttaacgacatatcgggcagactctccgggaagagcaggagtgccaattagatgggaattggtatcaacggatacatgtacatatgttagtttttcaaattcagggacgtgcataacatctgttttccatatctgattaggttctagtcttctagggttaacatctgttgaaggaggggatgtgcctgtgagagggcaatctgggctttgtaaaataatttgtatagctagtttttgggtaagttaaaattgttaagtttctccaattttgctgaaaaaattgatgtgattgggtggcttggtcaagcagtgacatcataacctacaggtctgcttgatcttaggtgtgaactagtggactggacagtgagctgtgggcccgaatctttgtaataaaaataggatgtgtttgttgaaccagcaattgctgaagttggaaaaaaaggacacacagggtgagctcaacagtggacttaatgaaggctgtttcaaggttttgcaataaataaacaaagtagtttatcagtgggaaaggtgcatgttctctttctttttctttttctttttgagacagagtcttgctctgtagcccaggctggagtgcagtggcacatcttggctgactgcaacctccgcctccagggttcaacaaattctcctgcctcagctgtccgcgtagctgggaatataggtgtgtgctaccacacctggctgttttttgtatttttaacagaaatggggtttcactgtgttagccaggatagtctcgatcttctgacctcatgatccaccggcctcggactcccaaagtgctgggattacaggtgttagccaccgcacccagctgagaaggacatgttctatatggcccacataatcagagagttctatctgaaggtatagaggtagggggatgactgctttgaattgctttttacttaagggtattcttacgaaatccaggtcataaccttgcaattgattgcaattgattgactttactactagatagacacagggagatggtattttagtcctggtatgtgagcaaagaacccattctaggaggtgcagccttggggccatctgtcttattaatcctgttggggaatatttagtaggaaatacaaataattggacttaatatcatgggtctatgcaatctagtagcctctgagtaatagcttgctctatttcctcaattttcctttttgcagtggggggtcaaatacctgggtgagtccaagtctgcattgccctttaggatagaaagtaggttctgtaacttatcagtagttatgcccgaggtggggcaaagccagttaatatcacccagtaatgtttgataatcatttaaggtgtgtaagttgttagtattcattcaaccttttgaggtcttactgaccggaaagttagtatgtattcaagatgtttccaagggaaggacatcagtaccttctcaggtactatgattaaacatctaaactgtgtattccttttgacagaggcatataaactcaaaagtattggctccgttggggctgccagtaagatgtcatccatgatcttgcaattaggaaattcttttctactggggagaaaatcctgatttacatgatactgacacatggtaggactgttcagcattctttgaggaagtactttccaatgattcagcaagctggcctttcattatttataactggtattgtaaatgcaaatttttctttgtcttattctgcaaggggaatagtagaaaaggagtcttttaagtcaataataactataggccaatctcaaggaactgctatgggggaagggagcccctgttgaatgggccccataggttgcaaattaacattgatagcaagtaagtcatgaaaaagtctccaattattagacttcttgtcaatgatggaaacaggtgaattccaatagctgtttgatggttctatatggccagcttttaaattgttcctcaactaattcatgggctccttgtaatttctctccctttaaaggccactgttctagccacataggattttgagagagccatgtcagggtaggggaaaaatcaaaacagtggccattaccagaaaggggtctgatattacctcaattaatcctctcataaatgggctagtggctccattttctctaatactttttcttatttcttcataagtgttgaaagcaatgagttcatgtacccaattgccttattgatctcccatcaccaagcaggcccagagctccccttctaatgctgtttgcctaaggcgtggccccataactttagtgtttccctttcattctacccaatttattggagaagggggctcagagaaaatctgtgtctcatctgtggcacctttacctggtaacagtggggctgagggagcaagaggagatattaaggtagatgatggttcttcctcccttcccttttaaggctcttctgtgtagagtggggccagagcagccctatctaaggcccataacattaaagatgctactgggacctgttgtccttgtgcaatttaagattaaatgacaagaatgtcatttaagatttcttctcacttgttcccagagctctaggtctagtgtaccatcttctgggaaccatgggttatggaaaacaatagtttgcattaggtcccttaattggggctccaagaccaaggctctgctagctttaagaagctgtttcaatatctttatatactgttgctgttgagtgaataactgttgttcatttttgagggttttgtcatgatccattgctctgttcctcacacagggcaccaccaatagcctttatagtctcagccatagtcatcctagccactgctagtgttgctgttgcatctattactgaatcagtacaaacagctacctttgtggatagcctggccagatatgtgtctaacgaatttctcctacagcagggaatagatcaaaaaattgttgcacattggcaagcccccaaggctgccttggagtatgtaggaaaataacaagatgtactggcattctgacagcaataatattgggaacataagcatatttgtgtcacctctctaccatggaatcgatcaatacaaagttgggatgaggtgaaacaacaactctgtggaaccttacatgataatgtaacagcagacgtaaagcaacttaaaacaacagttctagaatccctaaacactataaatctacacacccaacaagcagccatatggaaggatgtgcaagaacatctctcctaatagaccccctctcctgggggaccctccactccttgattggaaaagaataatactgattatattcatatttgtcttatgttatttagtaattctaggatgcaaagcctgaacacaagctataactgctgcacctgtcaaacctgtgcctgcacatctctgtactcttcaatcagaaaacctgaggcaaaaaagggggaaatgtgggagatcgatcacagtgatgcaagaaactatagggaaaagaacaggccttctgaaaagttggaaggctctgcatagctttggggtacaatatctaaaggcagttgttctctaaccctgaggcagagggtgaggagtatatgcaagggagtgaaggggaagttatcttgatcaggcttgtttgaagttgtccaggaactgacctttgatcatccacactggtgatgtttcctgaaaggggaacaataaacgttaattaccggattgtgtttgctccaggcttttggcattgtgcctgcactgactaaaagcaagcagcttgaacttctcatgactgaactctggccacttgagccagatagtcccctagctgctcttacaatgcatatctgtgtctgagtactcattttatccatcggcaagggtctgtggggcagacccgcactcgccctgtcacccaggctcaagtgcaataacatgatctcggcacactgcaacctccacctcctgggttcaagtgattctcctgccttagcctctggagtagctgggattgcaggcatgcaccaccacacccagctaattgttggtatttttagtggatacagggtttcaccatgttgaccaggctggtctcgaaatccggacattgtgattcacccacctcagcctcccaaattcctgggattacaggcatgagccaccatgctcagtgggtaatattgccttttttgcttgggctgtgcccttagaaggcattgagacatactgctgagcccaccactaacatgatgtgagttctctgcctacccctgaccacaggaagcattgtgacatatttcttgacccattacaatctctcctatgagcaaagctcaggtaaatgccctttttacctatgtgacgtgacatttctcttctgcctgggccatgcccacagattagagagtgacttactgctgaagcaagaaaaacagtgatgtaattattctgcctggtccctgcacacaggagtcactgtggtatatgtttaggcctcccacctagatgatgtgactcttttcttctggggtttgtcctcagtgggaattctgatatgacacgacatagctcctatgagatgtgactcttcctcatttttagcttcttctcactggggtgataggaacataaagctaagccaagcacctaggctatgtctctcctcttatttaggagccctacccacaagggacattgtgacatagctctaggcttctcaccttggtaatgtgactttgtgcctaggccctcccctcaggggtactgtgaaatactgctggaccaagaacctaggtgatgtgactctctgttactgcttggagtgtgcttaagaagaaattgtgggctgggtgcagtggctcacacctgtaatcccatcactttcggaggccaaggcaggcggatcatgaggtcaggagattgagaccatcctggctaacacggtgaaaccctgtctctactaaatatacaaaaaattagccaggtgtggtggcgtgcacctgtaatcccagctactcaggaggctgaggcaggagaatggcatgaactcgggaggcagagcttgcagtgagccaatattgcaccactgcactccagcctgggcgacagagcgagactccatctcaaaaaaaacaaaacagaacaaataaaaaaaaaagaagaaattgtgatgcacatttatgtgcatccagcacctgagtgatgttactctcctgtccttcatgagacctgcatgcatcatgtatttcaacatatctgtgggtctaacaacatggtgatgtgactttcctgcatgggctctcacacagaaatattctaacacaagtttttatttattatcttggtgatgtgacttttcttttctgcttgagcactgccaaaagaaaagattgtgacaaatcgctggacccagcacctaggtgatgtgaatctcttcacttgcctgagaggtgcatattttggttattgtgacatatcactgaaacaaacacgtaggggttggaaggcttctgcctgagccccttccacagagggccttggaatatattttttttatccatcgctgggagatgaaaccctctacttctacctgcattcttcccatagagaagatggtgatatattgctgggcccagcaaccaggtgttttgtctatcttttctgggctttgcctacagtgagccttgtgatatatttagctgagcccagcacccaggtgatcgtactcttcttcctgtgccctgctttcaggagaggattgtaacatctctggttgaagaccctgtgatgtgactctcctgcctggtgcatactctcaggaaagattgtgacataaccctggcccaacacacagttggtgtgaccctcgtgcttgttctctactcacaggtggaattgtgacatataacttggtcaagcacacagatgtaatgatgactttcaacctcgaagagccagtaggagagataacgttgctcatagctacttttaggaaaacaaaaaatcctgggttttccttctgtaaaaatgtcatagagaattaccactctctcacatatataaggccccagtgtgtcacagacaatgtcataacagagttcaccatacagatgagattgtgtttgtcctatgcacagcccagcaacctttagaattgtcaccatcacacatggacagagcccactggtggggccctgaatctcacatgaatgcactccacagttggaactttgtcatatgtgaacatctggccacagttgagatggtgactcatttcttttcttttttttttttaagtgccaagttattctttttttttaaattttttttttattatactttaagttttagggtacatgtgcacattgtgcaggttagttacatacgtatacatgtgccatgctggtgtgctgcacccactaactcatcatctagcattaggtatatctcccagtgctatccctccccccctccccccaccccacaacagtccccagagtgtgatgttccccttcctgtgtccatatgatctcatttttcaattcccacctatgagtgataatatgcggtgtttggttttttgttcttgtgatagtttactgagaatgatgatttccaatttcatccatgtccctacaaaggacatgaactcatcatttttgatggctgcatagtattccatggtgtatatgtgccacattttcttaatccagtctatcattgttggacatttgggttggttccaagtctttgctattgtgaataatgccgcaataaacatacgtgtgcatgtgtctttatagcagcaagatttatagtcttttgggtatatacccagtaatgggatggctgggtcaaatggtatttctagttctagatccctgaggaatcgccacactgacttccacaatggttgaactagtttacagtcccaccaacagtgtaaaagtgttcctatttctccacatcctctccagcacctgttgtttcctgactttttaatgattgccattctaactggtgtgagatggtatctcactgttgttttgatttgcatttctctgatggccagtgatggtgagcattttttcatgtgttttttggctgcataaatgtcttcttttgagaagtgtctgttcatgtccttcgcccactttttttgatggggttgtttttttcttgtaaatttgtttgagttcattgtagattctggatattagccctttgtcagatgagtaggttgcgaaaattttctcccattttgtaggttgcctgttcactctgatggtagtttcttttgctgtgcagaagctctttagtttaattagatctcatttgtcaattttggcttttgttgccattgcttttggtgttttagacatgaagtccttgcccatgcctatgtcctgaatggtatcgcctaggttttcttctagggtttttatggttttaggtctaacgtttaagtttttaatccatgttgaattgatttttgtataaggtgtaaggaagggatccagtttcagctttctactatggctagccagttttcccagcaccatttattaaatagggaatcctttccccattgcttgtttttctcaggtttgtcaaagatcagatagttgtagatatgcggcattatttctgagggctctgttctgttccattgatttatatctctgtttttgtaccagtaccatgctgttttggttactgtagccttgtagtatagtgtgatgcctccagctttgttcttttggctcaggattgacttggcgatgcgggctcttttttggttccatatgaactttaaagtagttttttccaattctgtgaagaaaggcattgatagcttgatgaggatggcattgaatctgtaaattaccttgggcagtatggccattttcacgatattgattcttcctacccatgagcatggtatgttcttccatttctttgtatcctcttttatttccttgagcagcagtttgtagttttccttgaagaggtccttcacgtcccttgtaagttggattcctaggtattttattctctttgaagcaattgtgaatgggagttcacttatgatttggctctctgtttgtctgttgttggtgtataggaatgcttgtgatttttgcacattgattttgtatcctgagactttgctgaagttgcttatcagcttaaggagattttgggctgagacaatggggttttctagatatacaatcatgtcatctgcaaagagggacaatttgacttcctcttttcctaattgaataccctttatttccttctcctgcctaattgccctggccagaacttccaacactatgttgaataggagtggtgagagagggcatccctgtcttgtgcccattttcaaagggaatgcttccagtttttgcccattcagtatgatattggctgtgggtttgttctagatagctcttattattttgaaatatgtcccatcaatacctaatttattgagagtttttagcatgaagggttgttgaattttgtcaaaggtcttttctgcatctattgagataatcatgtggtttttgtctttggttctgtttatatgctggattacatttattgatttgcgtatagtgaaccagccttgcatcccagggatgaagcccacttgatcatggtggataagctttttgatatgctgctggattcagtttgccagtattttattgaggatttttgcatcaatgttcatgaaggatatgggtctaaaattctcttttttggttgtgtctctgcctggctttggtatcagaatgatgctggcctcataaaatgagttagggaggattccctctttttctattgattggaatagtttcagaaggaatggtaccagctcctccttgtacctctggtagaattcggctgtgaatccatctggtcctggactctttttggttggtaagctattgattattgccacaatttcagatcatcttattggtctattcagagattcaacttcttcctggtttagtcttgggagagtgtatgtgtccaggaatttatccatttcttctagattttctagtttatttgtgtagaggtgtttgtagtattctctgatggtagtttgtatttctgtgggatcagtggtgatatcccctttatcattttttattgtgtctatttgattcttctctctttttttctttattagtcttgctagcggtctatcaattttgttgatcctttcaaaaaaccaacttctggattcattaattttatgaagggttttttgtgtctctatttccttcagttctgctctgattttagttatttcttgccttctgctagcttttgaatgtgtttgctcttgcttttctagttgttttaattgtgatgttagggtgtcaatttttgatctttcctgctttctcttgtgggcatttagtgctataaatttccctctacacactgctttgaatgtgtcccagagattctggtatgttgtgtctttgttctcgttggtttcaaagaacatctttatttctgcctttatttcgttatgtacccagtagtcattcaggagcaggttgttcagtttccatgtagttgagcggttttgagtgagattcttaatcctgagttctagtttgattgcactgtagtctgagagacagtttgttataatttctgttcttttacatttgctgaggagagctttacttccaagtatgtggtcaattttggaataggtgtggtgtggtgctgaaaaaaatgtatattctgttgatttggggtggagagttctgtagatgtctattaggtccgtttggagcagagctgagttcaattcctgggtatccttgttgactttctatctcattgatctgtctgatgttgacagtgggctgttaaagtctcccatttttaatgtgtgggagtctaagtctctttgtaggtcactcaggacttgctttatgaatctgggtgctcctgtattgggtgcatatatatttaggatagttagctcttcttgttgaactgatccctttaccattatgtaattgccttctttgtctcttttgatctttgttggtttaaagtctgttttatcagagactaggattgcaacccctgccttttttagttttccatttgcttggtagatcttcctccatccctttattttgagcctatgtgtgtctctccatgtgaaatgggtttcctgaatacagcacactgatgggtcttgactctttatccaatttgccagtctgtgtcttttaattggagcatttagtccatttacatttaaagttaatagtgttatgtgtgaatttgatcctgtcattatgatgttagctggttattttgcttgttagttgttgcagtttcttcctagtctcgatggtctttatattttggcatgattttgcagtggctggtaccggtttttcctttccatgtttagcgcttccttcaggagctcttttagggcaggcctggtggtgacaaaatctctcagcatttgcttgtctgtaaagtgttttatttctccttcacttatgaagcttagtttggctggatatgaaattctgggttgaaaattcttttctttaagaatgttgaatattggtccccactctcttctggcttgtagggtttctgccgagagatccgctgttagtctgatgggcttccctttgagggtaacctgacctttctctctggctgcccttaacattttttccttcatttcaactttggtgaatctgacaattatgtgtcttggagttgctcttctcgaggaatatctttgtggtgttctctgtatttcctgaatctgaacattggcctgccttgctagattggggaaatactcctggataatatcctgcagagtgttttccaacttggttccattctccccatcactttcaggtacaccaatcagatgtagatttggtcttttcacatagtcccatatttcttggaggctttgctcatttctttttattcttttttctctaaactttccttctcgcttcatttcattcatttcatcttccattgctgataccctttcttccagttgatcgcatcggctcctgaggcttctgcattcttcatgtagttctcgagccttggttttcagctccatcagctcctttaagcacttctctgtgttggttattggagttatacattcttctgaatttttttcaaagttttcaacttctttgcctttggtttgaatatcctcccgtagctcagagtaatttgatcgtctgaaggcttcttctctcagcttgtcaaagtcattctccgtccagctttgttctgttgctggtgaggagctgcgttcctttggaggaggagaggcactctgatttttagagtttccaattttttctgttctgttttttccccatctttgtggttttatctacttttggtctttgatgatggtgatgtacagatgggtttttggtgtggatgtcctttctgtttgttagttttccttctaacagacaggaccctcagctgcaggtctgttggagtaccctgcagtgtgaggtgtcagtgtgctcctgctggagggtgccccccagttaggctgctcgggcgtcaggggtcagggacccacttgaggaggcagtctgcccgttctcagatctccagctgcgtactgggagaacccctgctctcttcaaagctgtcagacagggacatttaagtctgcagaggttactgctgtctttttgtttgtctgtgccctgcccccagaggtggagcctacagaggcacacaggcctccttgagctgtggtgggcttcacccagttcgagcttcccggctgctttgtttacctaagcaagcctgggcaaaggtgggtgcccctcccccagcctcgctgctgccttgcagtttgatctcagactgctgtgctagcaatcagcgagactccgtggggtaggaccctccgagccaggcacgggatataatctcatggtgtgctgttttttaagcccgtcggaaaagcacagtatttgggtgggagtgacccgattttccaggtgccatccgtcacccctttgtttgattaggaaagggaactccctgaccccttgcacttcccgagtgaggcaatgcctcaccctgcttcagctcgcgcacggtgcgtgcacccactgacctgcgcccgctgtctgtcactccctagtgagatgaacccggtacctcagatggaaatgcagaaatcacccatcttctgcgtcactcaggctgggagctgtagactggagctgttcctatttggccatcttggctcctccagatggtgactcatttctaaaccctcctcataggaaggtgaggactctctcatctagactcagccaattagagagatgttgactctgggcttagaaccatagaaaagattctggattcccttcttgtacgaaggtcacagaggatcaccactcttgcatattgtataaagccctcaggtgacatggtgagtgtcataggagttcacagcacacaggtgagataatgtgtcttgaatgcatgcccaagtgacagtaaagattgtcattctcccacataaacatatcccactgttgaggttctgaatctcagacatggaggctgtgaaagttggagaattgactctcctatatggcctgggccacaggtgggctggtgaacttcagaccaagaattcagcacacatatgaggctgtgactgcactaacagaacacagtctgcagaagaaatggtagctcttttgcaaaaattctgtcagctattgagattgttactcatgaacttagacccatcatacaggaggtgttgactctcatatctagaacatggacctgtatggaatatctaatctcattcctggactttcctgcaggtgtgattgtgcctggtaagcattttagtgatttgactctcctgccttggctcagccctcagatgagactgtgacatatctctggactctgcacctcaaagaagtgactcgcttttccaggcttggtgttgcccacaggtgtcatggtgacatatggctgggccttccacccaggtaatgtgagtcttttcttgctttgtcactgcccacagggtgcattgtgatatattcctaaattctgcacttaggttacatgactccattttttttttttttttttgcctaagccctgagtattttgcatagtataacatattaccaggcccaacacctataaaatgggaggcttctgcctgggcctttcaacagagggccttgtgacatatctctgcatcaatcacctaggagctgtgactttctgttattgcctttactctgctcacaagaaaaattacgaattatcactaggcccagctaccaggtgatgtgtctctcttgcatgggtcttgactatagaaagcgttattagctattgctgggctcagcacccaggtgatgtgactctgctgcctgtgttttgctttcaggagaaggttgtaacatattcctggctgagtattaaagttatgtgacactcctgtctgatccctgccctcagtaaagattgtgatgtattcctggccaaaaacccaggtgatgtgactctccttctctctgcctattcacaggtgggattgtaaaatatagtttggcctagctcacaggtgcaatggtgactttcatacctctacccacctaacaggagagatgctgtcttttgtagctaggcctatggtaatgattataatcctgagtctcccttttgtacaaagtcataggaaattaccaatttcttgcatactatataaatctcttgtggtacagagagtgtcttcccagggttcagcacacagggagattgtagttcttatgtgcaatgtgcacagcccaccagctgttgggattgtcaccctcacacttggatagagcacactggtgaggccctgaatttcacacagacacagtccacagtagaaactgtgaactctcatatgtgaacatccagtcagggttgaaatgatgactgatttatgaacccagtacattggaaggtgagaattctatctgaacccatgaaaattctacctgggcttagggctagagtgaacacagtttacaggaggaatgaagggtctcaagctccaatccagttcattggtgaggttatcactaccttacttagacccaacatagaaaatgtggtgactctcatacctagaactgagacctgtgcaggattgttaattcactactggactttcctgcacgagtgattattacatatgcctatgttcagccctgagtgatttgattttgctgcatggtcccagtctgaaggtaagattgtgattcatcactggatccagcacctcggtgatttgactcttctttttttggggaccccacaaattttaagtattgtcaattttggctgaatcctgcacccatgttatatgactctcccaaatgtgccttacatgttgtgccgtattggggctcaatatatcacattagacattgttacatattgctgggttcaacacccaggtgatgtaacttttttttctgggactgcctgcaggggaccttgtgacataactcaatgtccatcaccatactgacgttactctcttctcctgcctggtctctgctcacagagaaattgtgacagattactggcctagcatctaggtgatgtgactctcctctttttctcaggctctacacatttgggtattgtgacatattgctgaactcaactcctaagggatgggagtctcctacttgggaccttcctacaggggacattgtggcatgtctctgcattcctcacctagcagatgtgactctcctcttctgcctgcaccctgcctacatggaaagttgtggcacattgctgttgtcagcaaccagatgatgtaattctcctgcctgggtctttattacaggaaagatgattgacatattactgagcccagcatccaggtgatgtgactctcttcttcttctggtccctgcttacagagaaattgcagcatattgctacactcagctcctagcttatgtgactcttttattcatttaggttttgccttcaggtgacattgtgtcataatgctggtccctgccctgacaatttgtgactcttctgcctgtgatttgcccatttgggccattgtgacatgttgctggattcaacactcaggtgatgtaacttttatgtctgggccttgcctacagggtcattttgaaatgtctctgtggctgggcgttgtggctcaaacttgtaatcccagcactttgggaggatgaggcaggtggatcaaaaggtcaggattcaagaccagcctggttaatatggtgaaacactgtctttactaaaaaaattaataataattacaaaaagcagctgggtgtggtgatgggcatctgtagtcccagctactcggggggccgaggcaggagaatcacttgaattcaggaggcagagtttgtaaagatcacacaactgcaccccagcctgggtaacagagtgaggctccatctcaaaaaaaaaaaaaaaaaaaaaagaaagaacgaaatgtctttgcaccaatcccacagatgatgtgactctcttgtgttaccatgtctctgctcacaggaagaactgagacattttacagcatgtagctgatttttgttgttgttgttgttcctgcaggaaagattgggcactgttactcaactaggcaccagaaagatattattttatttttcttagtcctgcccatgtaagacattgtgtcatgttcctgggccctacacgaagatgatgtgagttttctgtccatcaactattttatgtgactctcctctcttaccttcaccttgtccataggttagattgtaatatatctttgggcctgggtcacgctaagagaagtgagagtgacttattgctgggcccagcacacaggggatgtgattcttccacttggttcctgcccaattggtcattgtgacatatctctgagccaatcacctaaatgataggtctcttcttatctttctggacctgtccacagtaggaaatgtgacatatcactgggccaagcacctatgtgatatgactctcctctcaaaccaagcccttgcctgatgtaattgtgccatatagctgggcccagctgctacattagctgacctcatttttttcctgagccctacaaaacaatagcattataagatatttctgggccttttatctaggtgatttgacttttctgtctggtatgtcctctgaggggttattgtgacatgttgctgggtgcagcatttaggtgatgtgacttcctctactgcttggtctgaccaaaaggggattgtgatgtatcactgggcccagaacttatgtgatgggactcttttctcttgtctaggccctacaaacattttgcattgtgacatatagctgggtctgccacccaggtgatgtgagacttctacataagccctgaccacaagagtattatgaaacatcttttcattcatcacctaggtagtgatgtgactcttcttcagcctctacactgccacaagggaattgtgatgtatcactggacccagcacctagatgatgtaagacatcttttgactggaccttgcatattttgcatattgttacttttactgggtctgacattatgggatgagaggctcctgcctgggccctgccaacaggtggccttgtgacatattttggcatccatcacctatgaaatagggctctcctcacctacatgcaccatgcacaaagagaagatggtaacatatcactgggatcagccaccaggtgtgtgtataaccactcagggtgtttctcaaagacagcattgtagtgtatcactgggcccagcacctaggtaatgtgacttgtggcctgtgcacatcttttctttctctctttcctttttttttttttttgagacagagtctcactcttgtcacccaggttggagtgcagtgatatgatcttggctcactgcaacctctgcctcctgggttcaagctgttctcctgccttagcctcccatgtagctgggattacaggtatgcattgccacactgggctaatttttgtatttttagtagaggtggggtgtcaccacattggccaggctggcctcaaactcctgatgtcatgtgaaccacttgtcttgatctcccaatgcaagagccttccctcttgtctgggtataagccaatgcacccagtctgcctgtggccatcttacaggaataaattctaatgcatccctggccaagcacctaggtgatgtgatatgactctactctctggttcttgccctcagaaaagattgtgacatgcctttagaccagccccagatgacgtgactcttctgctcacttcctactcagcagcataattgtgacatatatcttgccccagcttgcaattgctatgttgattctcacaccttgaaccaggcaataaaagagttgcactctctcctagttaggcttaggaaaacaaacacgatccttagtcttttcgttttgccaaggtcatagagaattaccacgccctcaaatactgtataaagcccttgggtggcacagagagtgtcatcaagggacaaaaacacagatgatattgtgtttcttttattttcttttttttctttggagatgggagtctcactctgttattcaggctggagtgcagtggcacgatcttggctcactgcaacctccacctcctgagttcaaatgattctcctgcctatcctcctgagtatctgggactacaggcgcatgccacgaagccgagctaatttttgtaggggttttaccatgttggccaggctggtcttgaactcctcaccttaggtgatctgcccgcctctgcctcccaaagtgatgggattacaggtgtgagacactgcacccagccaaagtttgtgtttcttaaaagaacttcctgccgcctgttataattgtaacctcaacatggacagagcccactggtgaggtcctaaatctcatatgcagatgcagactgcagttggaattgtgactgtgatatacaaacatccagccaggaatggctcatttctaaagctacaaatgatgactctcttctaaatgtagctcataggcaggtgaggactttcctaaatggatcagccagttggaaagatattgactctcattcctgggcttagagtcacatgtagtatcatgggtccatatcatcacaaatgtcttagagtagattgcgactcacatgcgtattgcataaagtgtgggggatcagtcagagtggtgaaaagggaactataaatgttaattacctacaggttgtgttggctccaggtatttgacattgtgcctgcactgaataaaagcaagcagctccagcttctcggtgctgaaatctggccacaagagctgggcagttccctagctgctttaagactgcatacctatgtctgagtacttatttcatctgtcagccaggatgtgtgggacagaaccagcaggtggtgccccatgtgggaagcaacaaaatggatcatgacggaaccctcaaaaatgaaagggaagtgactgcacagtaagtaatttgtgtccactggggatttccaagttcaaaggaattttttcaagccagggttttatttattattattattattattattttgagatggagttttgcttttgtttcccaggctggagtgcaatggctcaatcttggctcatggcaacctccacctcccaggtttaagtgattctcctgcctcagcctcctgagtagctgggattgcagacatgcaccaccatgcctggctaattttgtattttttttgtagagatggggtttctccatgttggtctggctgatcttgaactcctgacctcaggtgattcactcacctcattctcccaaagtgctgggatcacagacatgaaccattgtgcccagactcaagctagggctttatcatgtgacaacaattatcagctcaacagcaacagtatataaaaaattgaaacaactgctaaaagctagtggagcctcagtttcaaaggctcaattaagggacctaatgcaaactgttgttttccatagcccatggttcccagaagaaggcatactagacctagaactctgggaacaagtgagaaggaatcttaaacattatgcacatgggcaacgagtcccagtaacatctttaatgttctttaatattatgggccttagttagggctgctttggccctgctctatacagaacagcctaaaaagggaagggaggaagaatcatcatctaccttactgcctcctcatcttcctcctcctcctcctccctcagcctggttgttaccagtaaaggtgccacagaggaggcagagatttttcctgagccccctctcccaataaattggggaaaagacaagggatacattacagttatgggaccctgtgttaggtaagcagcattagaaggggagctcttggcctgcccaatgatggaagatcaacaaggcagtcaggtacatgaacccattactttgaagacttataaagaaaaagcattagagaaaatggagccactagcccatttaggagaggattacttgaggccatagcagaaaactaccatatgaccccatgggactggtcaatattagctaaaacaactttagaggccagtcaatacctcctctggagggcagaatatgatgagttatgtgaacaacaagttaaccagaatcagttgggccaggcaaaacataacagctactatgctccaggggaggggtccctatgttaatgtataacaacaattaaatttttcctccaagcctatgcacatgtgtctttgtgcactcacagggcctgggaacgaattcccaaaggcagagtccaacagagatcttttgtaaatgtatgacaagggccccaggagccatttgttgaatttatcaattatttaacccagataacagtggaatgtacccattccacccttaagagtatgcttaaaaaaccaaaaacgggaatatgagtaggaaccctacaacactattagcacgagccttatttaccctaaatttcttaaatttagataataaatttcagtcagccatagaaaagcactttgcaaaaacctctcaaaatataaagcctcaagttttatggaaagatgtaaatagttgttgggaacaagcccccaaatctggccataaactggccccaaaactggccataaacaaaatctttgaagcactgtgacatgctcgtgatggccatgatgcccatgctgaaagttgtgggtttactggaacgagggcaaggaacacttggcccacctagggtgggaaaaccatttaaaggcattcctgaaccacaaacaatagcatgagcaatctgtgccttaaggactgattcctgctgcagataactagccagagcacatctctttatttctcacaaggaatatttttagttaatctataatctatagaaacaatgcttatcactggcttgctgccaataaatatgtgggtaaatctctgtttggggctgtcagttctgaagtctgtgagacccctgatttcccagtccacatgctatatttctgtgcgtgtgtctttaattcctctagtgccactgggttagggtctccatgactgagctggtctcggcaaatagtaatgtatagtgtggtccaaattatttgttaatgttgggaagaggatatgcttgggttcacaacccctcagcctctttggattccagcgtgacacaccaaaccttaccacagcatggctaggacccaaccccgtaccaaaaatgaaggaaattatcctgcagaacctgcaaccccagacaatgccactttctcagacatcacaggccccagacattacctgggggatgctgaagaagacaactcaggaggctgagtgaattctgctgcagaaaaagaaaccattccctcagataatgtgttcctttctatgctttctgttgtacattgtaactcttgcagggtattgattcttcttattctctcactttgcctgcaacccatacctgctatactctattgggcccatcttctagatccacctttcttccgcactgctacttcggcagagaccctcttcctagcctctaaaaatgcgactgattggctggaagggattgacatacctctagtgggggtccctcagtaatggcatacattggactgaggtggcaagtaccattacatatcactccttgattgtaaaagaataatattgattatactcatgtttgttttatattatttactggttctaagatgcaaagctggaacacaagctgtaaccactatgccagtcactgctcacatctgtatgcttcaatcatcaaaacttgatgcaaaaaaaaaagaggggaaatgttgggcttgggggggtgtcggtcagagtggtgaaaaatctatagggaaagaatgcaaacctcctgaaagtttggaaggtcctgcagagccccaggggataatagctgaaggcacctgttctataaccttgagtcagggggtgaggagtaaatacaagggagtgtgggggaactttatcttaaagaggcttgtttacttatgttgaccagaaactgacctttgatcatttgcacatgtgatgtttcttgaaaggggaacaataaatgttaattacctgcaggttgtattggctccaggttttcggcattgtgcctgcactgaataaaagaaagcagcccagcttctcagggctgcactctgtccaatatagccaggcagtcgcctagctgctcttacactgcatacctgtgtctgagtactcatttcatccatcagccagggtctgtgggacagacccagcgataaagccctcaggtaatatattgaatgcccttatatggtccagcacacaggtgacattgtgatactggtattcacaaccagtcaacagtaaatacgtcatccttttagataaacacaatctacttctgaagttctgaatctcatccctggaggaagtggaaagctgcaaaattgactctcacatgtggatctggtccacagctaggctgctgactcagatcaagattcagcacacctgtgagactatggcgtttactgaggagacacagtctgaaggagagaatgagactcttattcataaacctgtccacattgagattgtgatttgcatacttagacccaacctccaaatggtcttgactctcatacctagaatgggaatatgtgaaaagttattcatgctatccctgagtctttctgcatgtgtgattgttacacacatctctgttcataacctgagtgatttgacactcctgcctgggccctgcacacagatgggattgggacatattgttggaaccagtatgtagatgatgtgaccctaaactcatgccttggtgctgccaaagagggcattgtgacatatcactggtccctgcacccaggtaatgtgcttgtcctttctgtgccctgcccacattggctactgtaacatatccctgggtctaacacccaggagatatgaatctctgccctagaccctggctacaggaggcattttgccatattcctggacccatctatttgatgggttactttccactcttacatgggcttttccctaggagacatatgtaatgtttctcttttctcctatctggacccagaccacagaagcgagagtgactaatccctagtgacatttcacaggtgatgtaatttttctgccttatacctgtccacagaggacatagtgaatgtccctggcccactaaactggattatatgactttttatttttgtctcagaactgtcaacagtggggattgtgacagatcactcttctcagcacttacataatatttttcccatccttgggcactgcccactggggtgattgtgacatataactaggtgaaggccctaggttatgacttttctcttcgacattagccttgcccacacagggtgttttgacatatctctgaagctctaatttaggtagactgctgcatgggctcttcatttttcagggagtattgtcccatatttttttcacctagtaataaggtgatgttactctcttctagtgcttgggctctgcccaaaaagggcatatttcaaaagttccatcacctaggtgttgggtccagccacatttcaatatacaaattgtatattgtgtatgttaaaaactgtgtatattgaaatacggctgggtccaacacctatgtgatctaactctcccacgtgagcccttccaataggggaattatgacatattttgtttatcacctaagtgatgtaactctccttttctacctgagccctgtataaagggagaattgtgacatatcactggacccagcatctggtgatatcaccctcttttttcttttcttttgtcttttttttttgagatgacatctcactttgtatcccaagctggagtgcagtggtgtgatcacggctcattgcaacatccatctcccaggttcaagtgattctcctgccttaacctcctgagtagctgggattacaggtgtgtgctaccacagctggctaatttttgtatttttagtagagatggggttttgccatgtttgccaggctggtctccaactcctgacctcaagcgatctgccagcctcagcctcccaaagtgctgggattataggcatgagccactgcaccagcccttatcactctcctctttcaaattggccccatctattttaggtattaaaacatattgctgggtcaaatcaagtgggtgagaggctctagcctgggccctgcccactagaggccttgtgacatgtctctgcatcctttactttgaggtatgactttcctcttgcatctgcatcatgcccacacagaagattgtgatatacttctgggttcagcaaccaggtggtgtttttcttgtacccaggtcttacctgcagaaaaaattgtgacatatagctgggcccattacccaggtaatatgtctttgctgtttgtgccctgctttctggagaaaattgtaacataaccctggccaggcaaccaggtgatattactctctgcctggtctctgccctggaaaaattgtgacatatttctgacccagcacccaggtgatgttagtcttttgtttttttctactcacagtttgggttgtgacatataccttacccaagctcacagttgtgatgatgacacaaataccatgaatcagccaaaaggagagatactggcacttgtaactaaacttagagaaatgggaatattcctgtgtcttctctatataataacatcatagaggattaccattctttcacatttatattaagtctttggatggtacagagagtgtcatcacagaaccaagcacacaggtgagactgtgtttcccacatgcacaacctaccaaatgttagcaatgtcaccctgacacatggacagtgcccactggagagatactgatttcacaggtgagtgcagtccacagtaaaaattctgactgtcatatgtgatcatgcccccagagttaatatagtgactcatttctttctttcttttttttttttttttgagacagagtcttgcactgttgccaggctggagtgcaatggcacaatctcagcccactgcaacctacacttcctggttcaaatgattatccagagtagctgggattataggtgcatgccactagtcctggctaatttttttttttttttttttttttttgtatttttagtagagatgggatttcaccatgttggtcagactggtctcaaaatgttgacctcaggtgatccacccactttggcctcccaaagtgctgggactaggggcaattgtttaaagatattttgtttctgactagcagtctcacccattatttctttattctgaaatttctaaaacaaaagaatatatgtagccaatcaataacttatgcatttaagtatgaattcttggtaaataacttagggactggcttctcacttttttgaaaagactcactttcaatggctgttaattgaaatatatattcagggcaacttaaatctgtcctcctgatggccatcctcaatatcagatcttgagtaaatatatttcagattacattttaactttttgattattttaagttgactcagggctggcctggaacattctcctgggtgtaaatactctgactataagctacctgctcagtagaggaaactaatcaacagcatggcctagcatagttcaaagacacatgtggtgagaagctcactggggcctggctcctaattgcaaggacagttgcacaggtgtgtctgaatgcttggtgagcctggcctttcctcacccaatgtctctcaccagccatttcaaccacatcttggccttctgtcattctgttctctggggtgaaaactcatcttcagggctgtctacaacaaaagagaaacatcagattaccaaaacctcaggaatagggattacagattggattaagagcctgcgctttcttaaggatgatatgtatggaaaatcagcaaataatttcagaatgatacaagaaaaaatgcctctaataggtattcatactatagttcaactcgatttgttctgtacatggtagggaaaatgggataaaatatcgtaagttcaagcatttttgctgctcagtcagaatgaaaccctgcagcaggcatgggcatgtttcatgagagaaatagaataaaaagagttagacaatatgatcatttattgcaagccccctgccacttgattcagtgagcatttttgggtgaagtggaacctctttctgtcaggtctgaaggttcagatgtgtcggtcctatctgcccctagttcacctgaaagttctattgagaaccctttgtccctcctccttacccttctagttcctctctacacccaccacgccctgaagaatggaactcagtgggtactactagtagtggggctgcctatcaacctccaaaaggaaatctttgtccacttagagaggttgcaaatggggaagaagtcattgtgagaggacatgtccccttttctatgtctggtttggctctataataagacaagtttggtcatttctctgaagatccagaaaaattcatagatgagtttgaaaagttaactctgacctatactttaacttggcaggatctgtatgttttgttgtctctgtgttgtacgtggaagagaaacaatgcattttggggacagctaggactcatgcagatgaggtattggcttgcagcctgaaccataatatatatcagacaggaggtatagcagttccagattaagatctacgatggaatatcaaaggggcagtgaggacttgggagaagagatcatatggttacttgtttgttggaagagatgaagaaatgtaagaaaaaccttgttaacaatgaaaaggttaaggaagtttctcagggcaaagacgagaatccagctttgtttcaatagcatttagttgaggcaatcaggaaatatactaacatggatcttgcctcaaggtaaagataaacccttctgggagtccactttataacccagtcttcctctgatatccatagaaaactagtaaaagcagctatgggtccccaaacttctatgaacagctttggatatggcatttttagtttttaataacagaggcaaagtggaggaaggagaaagaggaagaaggacctccacaaggtgcagcttttggctgcaaccttaagcttacctcccatatgggaggttgccttcctaggtcttggcttgaacaagggaagctgaaaggtgaaaagcccaaagctgggaatccgagtcactgtgctttgggcataaatcagtgtgcacactgtaagaaaacaggccattggaagagggatagtccagtgttctgaagagagccgtcagcacccaaactaatgatgggtgaaacagccaggcaagtgcccaagagtgacggggcctgagaccttccatcacagcttccatcagacaactagccatatatctggagaagcctcagtaacctttgccatggcaggtaagaatattaatttttgccaggtgtggtagctcacgcctgcaatcctagcactttgggaggccaagatgggaggatcacttgaggtcaggagtttgagagtagcctggccaacatggtgaaaccccatctctactaaaaatacgaaaaaaaaaaaatctgggaattgcttgaatccaagaggcggaggttgtggtgagctgagattgtgccactgcactccagcctgggcaagagagcgagactctatctcaaaaaaaaaaaaaaaaaaaagaaaacaaaaaagaatattaactttcttctggatggcttactctgttttgacccatataatgggtctctgttgccccaaaacttcatggtcacaggggtagactgagaagcctatagatgccattttacctattctccatgctgtttttcagagaccttggttttcttacacaactttcttatcatgcctggatacctcagggcagttgcagcaacttctcttttggtagatgaatccaataaactggctttagaacaacacctggaagttaaaacccacaccaagtacaaggagtcctagaagctaaaggacaccagtggatgacagggggacgcttattgaaatagcaggcattttgctagacactcctgataaactactgatatgaggtgctaatcaataaaaaatagttaaacatttgcatgactctacccatttgggaagagattccctgtttcaaataatgtcttggctttttatagaaaaaggattacttaaaacagtaaactaggttacttgagcctgtgaaggatgtgtctggaataacccaaatgaccaatgtttacctcctcctttagtaaggcctattcagcatagacgaacataccctggtgaagactggcaaatagactatactcagatgaccccatgtaaagggtttaaatatttattagtattcattgacacctttggatcgaggcttttcctacccgatctgaaaaggcaattgagattcccaaactcctgctaaaagaaataattacacccctgggtgaggtggctcatgcctgtaatccctgcactttgggaggctgaggcgggtggatcatctgaggtcaggagttcaagaccagcctggctaacatgatgaaacccccgtctctactaaaaatacaaaaaattagccaggcgtggtggagggcacatctaatcccagctacttggatgctgaagcaggagaatcacttgaagctgagaggcagaggttgcagtgagcttagagtgtatcactgcactccagcctgggtgacaagagtgaaactcttttgcaaaaaaaaaaaaaaaaaaaaaagaaaagaaaagagaagaaataattcctagatttgggctgctaagaaattacacagagataatggcttatttttcacagtgacaaatacacaaaacatatcttgatacctagaaatttagtactgccttcactcagcgtgaaggccacagtcttcagtgaacgtaaaaagagctaatcaaactgaaaagaggactcttgctatgctatgccaagaaatatcaaagacctggctgtctttactatctgtagccttattacagattccagtggcctctaagggaaatctgcagctcagctcttttgaaataatgtatgcaaggccttttttagctacacgccttctttactgtgcctaatagacacggatactttcaagttacagaattatgtgacaagtgcaaaacacactctgaatatggaaatcaaagactcctttccccaactaaggaagctaatcttgttataacccagccaggaaatttggtcctattaaaaacttggaaaaaaggatccccagcaggtcaactttccccaaagtggaagggaccctatcaagttctctttagtaccccaactgcagttaaaattctgggaataaatagctgggtccacttaactcgaattaaacctgtctcttatgaagtcctacaggacggcagaacagaagaaactgatcctgtttattcccatgagccagtgacctttgactcctgttcagaagaaatgaaagggatgggtaacataaagatatagattggctttctacttttgggaattagttgaaatcatgcagagagtaacttatttactgagtgggcacagacttcatcctgtctacataatcgaacaaactgttgtgtatgtagacatttaaacagagactcaaaaggaaacctatgctttgatcaaaaccaaatgttttgtgtgtgctccagactatttacataacataacccagggcataaaagttttatgcactcacatctctgccatttatgtgctatcagtgaaccatatatcagtttggttctaacaactgcccacttcttgaaaggctttcctgtttagtttacgtggaataattttactaattttgctttgctgttgtggaatatattgtggttgtactctttgtgtaggaatgcaagacaagctcactaaatgctttcttaaattggacgcttattaatcttctagacatcaccttcttttggaactagaagttatgaacgaccttcaccataccaacactgtctgactgaatttctctctaccctgaatgcaagagaccaatggttaggcaggaatattatcgcccctaatcagcctgaaaaagttacagaagacgaatctttgtctctctgcaactcttaggattaagggtcctcttgtaaaggaaggcgaaaaatatgtcagaatcatttgaaccagagcgactccgttttgagagagagctaggaaaatgacgctgagactcgctgggctgcattctcagtaagttaggcattcctagcctctagatatttatggttaaggaaatgaattaataatgtttactaagcagaaccagacggaggagtgtccagatattccaacatctggggaataaaggtattcctaattttgctttaaagataatatcgagtcggccaggcatggtggctcacgactgtaatcctagcattttgggaggtcgaggcgggtggatctcctgaggtcagaagttcgaaaccagcctggctaacgtggcgaaaccccatctctactaaaaaaaaccaaaaaacaaaaattagcccggtgtggctgtgtgcacctgtagtcccagctactatggaggctgaggcaggagaatcgcttgatcccggaaggcgaaggttgcagtgagccgagatcgcgccattgcactccagcctggacaacaagagcgaaactttgtctaaaaaaaaaattattcacatatttaatacgttgaaaaaaagacagcaaagaagagagaaaatttttccgtgttctgagatgggcctcgttcagctccgggaggaagccccgcctgaaaaggctgaggcttaggctgtcaatctttcttcattcagcccaacgtctgatgacatcttctgtcactcagggccttagaaagcggggttcttaaacgttatccaatcagagacgctgtcctgggaactgtccaatcaggcacgcagctggagcgaacagggcggcttccgggatttggcggggcctttgtctctatctgcggccggagctccaggtctcgtcctcactactctgtgtcttctgcttttaggggcgcagcctctgtggccctgtgacctgccccctggaagcctagaaatggtgagagtgccgggtgcgacatcccaagagagggaacggggctggctggaaccggtgggaagcggcagtggcgggactcaggcctcctcgctgtcagttttacaatctgcgcccgagttgttgcccagctcggcctcagtcccttcagccttaagatggcggctgcgctgacagccgggctcccgggcgttctgtctcttcactgcgcagtgactgtgccctggcctggagccctctttgggcagctctgcaccagtagccccgcgtctctcccagattgtgcagggaccatgggaggaacgtcagggcagaatcctgactccgggtgcgggctcatgaatgggaagagctttggtccgtggggttttcaggccattttttcctattaaaaatttatgggcctcactgcaaaaacattaaataatttaaagtgtgattcaaaaattttagagcaccttgctgtggtttctaatttgtattccatggaaggaaaggtttttataagtttcatcataaaaccaaattccgtaattggctaggtacggttatgtagattttgttgttattttgttgttgttgttttgttttcattttcttttttttttgaggcagagtctctgttgcccaggctgaagtgcagtttcgtgatctcggctcactgcaacctccacctcccgggttcaagcgatttttctgcctcagcctccctagtagttgggactacaggcgcctgccaccacatttggcaattttttttatttttagcggagacgggggtttcaccgtgttggtcaggcaggtctcgatctcctgacctcaggtgatccacccacctcggccttccaaagttctgggattacaggcgtgagccactgcccccgtcctagttcttaatttttacaatcaaggtggaaatatcatggttatgtaatcagagcttaattggcagtttatagttggttaagcgttaagcctgaattttgtttctgccaatgtagtaatttacaaaaaaatgctcttgagtttagactttttttttagaagtagaaatccagggactagagccacctcaatctaatttcctgccacttaatggttttcacactccacaggggactgattttttccctgaatttttcacaagtgtcccaagcagggcctcaagtctgcccctcatcccttattcctccagcctgactggcttgcagtaaaatactaaatttccagttttgtctgacgttgccaaatgccagtttctcctctctaattgactttatcaactatttgtcctttagtgtacatattgatacctattttaatgaatctttttttttttttaaaagtatttgagacagagccttgctctgttgcagtgcagtggctggagtgcagtggcatgacttaggctcactgcagcctccgcctcctgggctcaaacggttctcatttctgtctcccaagtagctggaattacagatgcctggcaccacgcctggctaatttttgtagttttagtagagacggggtttcactatgttggccaggctggtcttgaacttctggtttcaagtcatcctcctgcctcggcctcccaaagagctgggattacacatgtgagctaccgtgcctggtgaattaattattttttgacaaagcatttgatggcacatttacaatgattttttttctaaatatttcctacgagaataaagcaaagaataatctgacactattgtaaaatatctgtgtttttttcttttattttacctagtcacagatatcttagaatgtttttgggtcaagatttttttttttttggaaacttcatagggtgacgtatcttcagtcacacttcagttttagacaatcaactaattgaatggcctgacttgacacatgagtaaaacatatctgtaccttgaaaggatttgttcatttgctttgacctaaagtttatttatgtatctttttaagacagagtttccctctgtcacccaggctggagtaaagtggtgccatctctgctcactgcaacctccaaatcctgacttcaggtgattgtcatgcttcagtctcccaagtaggtgggattacaggtgtgcaccaccacacccacctagtttttgtattcttagtagaaatggagtttcaccatgctagccaggctggtgtcaaacttctggcctcaagtgactcaccttctttggcctcccaaagtgctgtgattacaggcatgagccactgtgctcagctgacctcagttttttaactgtgtattgcattttattagtagagcttgaaaggtaaggaaatatttacaaaggccataaaaggtgagtttcaaaaattaataatatattttacttgttgaaaacttttactttatctttctcagagtgagtttagaaattttctcaggcatgtgcttttatggctgagtgatttcatacagaagtccatctagcttttagaatggtagctaccaaagaaaaaaagaaaaaaaaaaaaaatctctgttcaatttcagctgtagacaatgaatacatttccccaaaaaatgtggtagataattggtgagttacatatattactgaaaacttcagttccttttttttagcagggtaaaattttgacagtgaatatctttattctgtatccttttttgtttgtttactacctgatttttaatacaaataataaaataatacatttactgtctgaaaggaatacatagttttgcttttcttactgaggtataaaatgtaagcaccttaaaatgttctttcgttatatgaacaccgaggaattttgctgattttttctaacagttttagtttcaaaaatgaaattaataactaacatggaaattaaagcttaagctgcaggagggtgccccttgtaggttgccatgagagtaagcaggaacaaaggaaagtagaggggttttattacctctaagcagcttgtccttcttactgtgtcctgtctccattggctggagttggatggcacaatccagttggctaaacccggttggctaacttgaaaagtgcaggaatgcggttatacctgtggcaaggcaggaagatcagtttcggtggaagtagcccttgtgacgggaggggtaattcacagagtgggtagcaggtgtgggatgtggctccatacataagaactggcgagaaggttgtttaccagggaagggggaacacagagagtaaggaagtctggccttgaaagcaagggaaaaaagggcaaagaaacttaagcaagctaaacttttgaagaataatttcttacagtattcaacatctatgcattacacgattaagaaaaggctcatttaaacaggatggcatttattacccagaaagttctgaaaaaactgtcgggagatacctgcttattagggtgctaaaaaaaggccacttaaaatcactattaaaaattgtagaacatggaagatatctgtatcttggactttccataaaaatgatgttttcttagggctaaattcagactgtaatttgctttagtgggggtaatacctcagtagtgatgctgtgtcctgcgtgcatcagcacactataaagacttgtcctagtgcagttgatgttaattccataagctctcttacagaatttttctttatggagttatttttctcttcatcattaagtatcttcatgcagctgatgtgcataaaccatcacacttaaatggcagctgcctgttttttttaggtattctttgcatttatcttttgttggtaaatgaaagctctcatctttgtttacaggccagaaaaactgaaaaaaaaaacacgactcttccacttactggatgtttgacaaaatagtcttttggggccaaaacatttgcattactaatgagcttgatagagattcagtaactcagactttatttcagatcttctgaaaaaatactctgcattaacgagatgtccagtttattgtacacatttaaatttgagtggtaccttctaactcaacatgtttattttgtctgaaaaatataaacagctgtctttttcatctgaaaaatatacacaactcattcagtattatgtaaatactgtactcaaaaatgtacatgttagtacatttttacactttatcattcagaaaagtatcatatatacactgatgttctggatattatgccagtctcttttctcagagttagagaatacattagaaaatgtttgtgttttgacaattattttattggataatttcagtccctcttataagttagaatcaattctattcactttctgattttaccttgagtcaaatgaaaaattctgcccatagccactttgtaaatatgtgtgtttgtgtgtattttccagggactgttgacatttagggatgtggccatagaattctctctggaggagtggcagtgcctggacactgcacagaagaatttatataggaatgtgatgttagagaactacagaaacctggccttcctgggtgaggataactttaatacaaaatttttaatataaactaaagcttttatttttcttttgtagtatgttttctggtaatttatgctttcctatttctgttttcaagaaaatcctggggatttgtctgtttagaaaaaatttcttcaagatgtttcatcctgacctgaaatttccacattcctgagctgatctgtgtctttcgctttagattagtggtaatttcagaaccttagtggcataaaatattgttattcacaccttaaaatccaagtgccattaccaatttttgcttcagtagtaccaggcagtgaaattaagaacctacaaaattaaaatattctgtaaatatttaaaaatttctgttataaattagtatatgggataaatttattagaatattctattatatcccttttactttgcacattactaagttggtaattggagaatatgagcaagattcatgttaattatttttaataaaacaggtattgctgtctctaagccagacctcatcatctgtctggagaaagaaaaagagccctggaatatgaagcgagatgagatggtggatgaacccccaggtaggtgagagtgaatacaacagatgacctggatgagaggtccaacgtcaagaagaaagccagtctttaaagtgatttggaaagctgcattccaaaggaaaccgtttctggaaagcctgaaatttaaaaaaaaatatactctcagataggggcatcttctgcttatgcttataaaatctctaagaattctactctcccttcaatgatcttccttaacgtttacagtgacagccaaagtactgttcatggcatataaaagagtgtacaatctgactttttttttcttgtttttgtggacagatagatatctgcatagttttgagacactctatgttaaaatttttttttgttttagaaggagtttcgcttttgtggcccatgctggagtgcaatggtgcgatctcggctcactgcaacctctgcctcccaggttgaagtgattgtcctgcctcaggctcctgagtagctggggttacaggtgcacaccaccacaactggctaattttttgtatttctcgtagagacggagtttcatcatgttggccaggctggtctcctgacctcaggtgatccacccacctcagactcccaaagtgctgggattacaggtgtgagccaccgtgcctggcctctctttttgcacaagagtagtggtttctgtttcattaggggtttttttttgtttgtttgtttttctgctcatttcatcctgttttttttcttgctttcttttttttttttgtttatttaatatggccgtttttacttcctgcagaaagggtatactcgccagcagttttgccatgagagtacactgagcaaaggagacagggtcatttataacctgatgtgtccactctactgctgtgtccagtttccactggctggaacgggcatcctgttttcattactatagccttgaaatatagtttgggccatgcgtggtggctcacgcctgtaatcccagcattttgggaggccaaggtgggtgaatcacgaggtcacgaatttgagaccagcctggccaacatggtgaaaccccatctatactaaaaataaaaaaattagctgggctcagtggtgggcacctgtaatcccagctactcaggtggctgaggcaggagaattgcttgaacccaggagccagaggttgcaatgagctgagatcatgccactgtactttagcctgggcggcagagcaagactctctctcgatgtatatatatatagtttgaaattataaagtataatgtccttctgctttgttctttttcctcaagattgctttggctattcaaaatttattgtggtttcgtgtacattttaggattgtaattttcattactgtgaaaaactggaattttgacagggagtttattgagtctagagatcaccttagataatatggcagtttcacaatacttattctttcaatagaaataaaatatttttaaatttatttgtgtcctctctaatttttttattgctatatctttcacttaaaagatttatgagctgcttggttaaatttgttctaaaattgattattttattgctattgtaaataatgttttttcctctattttatcagagagatggttttaagtgtatggaatgataacttataattgtatgttaatttcatattttgctaatcaactgagtgtattaattagtttaaagaggttttaatgtacttttttatatgtaagatgacataatctacaaacagtgacgttttacttattggtcttcaatttcaatgactttaaatttttgttttgactacttcttaattcacatactttcagtgctatgttaaaatagaagcattgacaataagagacaatagtattgcgttggtgtctgtaaatttgaaggagcaaacacctcttcagaattttataaactggtttcagaaactaaaaatctattttcgttgtacccccagggtgatagaatatcctctgggtttgtagtgaagaggggttgtagcttggtcttaagtctgctgggtttgcacaagggtccacttttagttgtcttgttaaacagggcttggatatttgtaattctcatttaaattttagacagagtgagtatccttcaggactttgctctgaagggcagacccaagggcaggtttctgcagtcaggtctgtatatggtgttctttatatcaggatgtggatgagcatggctttcacccagtacaagagaggattttcccaggtcactttggatttctacataggcagaactggccatgaactgtggctcagggagctggaactgagtcatggaactgcttcagggaccacaggaaaggccaaggtctgaggcctgccatcatggctataaatggaggtcttcctccaggcctctggaagggcaggacccacgctgcccattggctcccaagactgtggctgtgaagagtttgggatggttacagagtaagtttaaaattctcagtggaaccaagttaggtggagcactttcttgtctgtagccaaaaacagtggtcatgtagtttgcaacctgaacggaggcctgccttctaaacagaattaccttgaatcttgggctttagcagaatttcacaactcctttcctggatctcagagctctcttaaaggcatttatttttgagatgaggtcttgctacataatccaggcaagtcttaatattttgacctcaagcagttcttcaactgtaatgtaccatgtagttttcattacaggtgtgaaccatgatgcctggttctctcataaaagcatttttgtcaggaatggatgacaaattttcttgctgtcaggggataagcaaataggtcacctttttttttttttatcttattaatgccactctccatataaatttttactttctattttctacttcaaatttgtctgtaattttagattcagacatttaggacaatatactagaatttacatgttgttcctgaattaaattagataatacgcaggcaggcaaaaaggaattacagaattttcaaccacttttgtcagcctataactaaataacataatttattccccaaatatttgtttcacatatgaggctctaaccatattctgctaaatatatatataattaagcaatgtaaggctattctttgcttctaaacttggattacagtagttttattttgtgtaaaaatagcatatatttaaaacataaaaattggcatgaatttcttttaaatgcttatctattaaaagtttctcattagcatctcctatttatgattgtactgcattttctctgaaattttattgccatacaatagatgccagtaattttttttttttttttttttgagatggagtctcgctctgtcacccaggctggagtgcagtggcgtgatcttggctcactgcaacctccgcctcccaggttcaagccattctcctgcctcagcctcctgagtagctgggactataggtgccgacaccgcgcttggctaattttttgtatttttagtagaaacggggtttcaccgtgctctcgatctcctgatctcgtgatctgcccgcctcggcctcccaaagtgctgggattacagatgccagtaatttaaaatgcctgccttccatgaatgcacagttacagtcaaacattgcagttatctagacaaattatttgttaatgtacataaatgttgccaactagttgtaatgagtaaacatttctgttattgtgttgcagttttatattagtgttttttgtagtgtaagtttcctaacatcagtttattgtgcctattggttttttcttatatattatgttttgtatactttaagttaatgtggagtttaattaaaagataaatgagccatgtctatcacagtcaaattatatatatgtgtgtgtgtttatatctataaatatgaccccaattttggttataccttgtatatattctttcttagctcttttttttttttctttgagaggaagttttactcttgttgccgaggctgaagtgtaatgcacgatcttgactcactgcaacctctgtctcccgggttcaagtaattctcctgcctcagcctcctgagtagctgggattacaggcacatgccaccacacctggctaattttgtattttttttttttttttagtagaaatggtatttctccatgttggtcaggctggtctcaaactcctgacctcagttgaaatgcccaccttggcctctgaaagtgctgggattacaggcgtgagccgccttgcctggcctcttagctcattttcaatgttggttttatcttgtctaagttagtagccttggaaatagtcttattttcaccatgtgtttaatgatgaatatatatttcctttgtgtgagataattcttttgtgatttgaaggtaatttttaaaaaagattcataatcctgtattgtctccagttttttaaaaaataattgttttaaaaaaacataacatataatttaccttcttaaatccatttaaatgtacatgtcagggcgaggcaatgtggtggatcccttctgtaaaaccaggattttgagaggccgggacaggaggtttgcttgagcccaaaagattgagaccaacctgggtaaaatatggagacaccctctctacagatatttttttctaagaaatagcaaggcatggtggtgtgcacctgtggtcccagctacttgagagtttgagggtcaggattacttgacgctgggagtgtgaggctgcagtgagccataattgtcccattgtactcaaacttgggtgacagattgagaccttgtcttaaaaaaaaaaaagtgtatatttcaggcatatcatgtatattcacattgttatgcaaaagacttctagaaattttacatcttgtaaaactaaaactcaatatccattaaataacatttacccattttatgctctctttagcccttgagaagcacttttccactttctgtttttacaagtgtaattgtcttatatatctaagtgaaatcgtaacatccatcatttctttactggtttatttcagttggcataatattctcaaagtgtatcttcaaatgtgacgatttttttcaaggctgaataatattccattgtatcaaatatgtcttcaggttcctatgttatgtattttagatatagattcataaatggaatcactttatttaataatttatattatttgaagtacatttataacattataaaataattggtacatctttattttccaccgacaatcaacccaactaacttttgtatttttagtagagacgggatttcaccatgttggtcaggctggtctcaaactcctgacgtcaggattcacccacctctgcctcccaaagtgctgggattacaggcttgagccaccacgcccggccaagggttttatttttattgcatcatcaacagatttggtgttttcaaaaaattgatagtggccatttaaatgagtgtgaggggattttgttttttattatgacttttatgcatttctctacaaattagttttgagtgtcctttcaaatttttgaagaaaatttatttcaatttgtctatttctaaataaagttattcaatttgattgttcagtttttcttttctttttttttttttttttttgggagatgaagtcttgctctgtcacccaggctgaagtgcaatggtgagatctcggctccctgcaacctccgcctcctgggttcaagcgattctcccacctcagccttgtgagtagctgaaataacaggcgtgtgccaccatgcctggctcatttttgtatttttagtagagacagagtttcaccatgttggtcaggatggtctggaacacctgtcctcgtgatccgcctgcctctgcctttcagtgtgctgcaattacaggtgtgagccaccacgcccggctattgtttggttttaaaagtttatagtttttgaatattgactcccatcacatgtaatttgtaaatattttcacccattttctagaatgcattatccatcttttaaatatttatatgtgcagaaatgttgaagtgtagtgtagttaaattttttgtttttttctttggtgctcatgcatttaattttatatctaagaaaatggccccaagactgatgtcgtgttttccctatatattttaaagagattaagaagttatccggtcgggtgcggtggctcatgcctgtaatcccagcgctttgagaggctgaggtgggcggatcataaggacaggagttcaagacaagcctggccaacgtggtgaaaccccgtctctactaaaaatacaaaaaaattagctgagcgtgatggcgtgcatgttaatcccagcaactcaggaggttgaggtgggagaatcacttgaacccaggaggcggaggttgtagtgagccgagaccatgccactgcactccacctgggctgcactccagcctgggcaacagagcaagactctgttccaaaaaaaaaaaaaaaaaaaagttatcttcctatgtctaatgaaaagatttttcacatatggtatagagaaataatcgaacttcattttatcgttatggatgttcagctttcaacataattttttgaaaagattatcttttttctactgtgtgctcatgttaattttgtgggagattatttggccttacacagaagggttcatttctgggctctctattctgttctttcatctctttatctgtctttgtgtcagtaccaaattgtttttgttattgttgattttaatgtgtttcaaaatcagaaaatataatgtctctgttgtttttcatgggtgtttgtctatagttcataataaaattttaacattttaaacaatgtttccttaaaaaacccctatttggatttatataaaaattattattttttgagatggagtcttgctctgtcgcccaggctggagtgcagtggcactatctcggctcactgcaacctctgcctcccaggttcaagcaattctcctgtctcaacttccagagtagctgggattacatgcccagctaaatttttttgtatttttagtagagacggggtttcactgtgttgcccaggctggtttagaattcctgagttcaggcaatccacccgcctcagcctcccaaagtgctaggattacaggtgtgagtcacctcacccggccataaaaattatattaaatatgtctaccactgtaggttgtattgacattttgaaaaattaatgtttttttattcctgagcaaaaatatgttgaaaagtgtgttttatttttatatatttttatattgttcagttttacttttaatttctagtttaattcagttttggtcagacaacacaaagtgtgtaattttggtcttcttaaatttatttgttattgttgtgtttgttgtggtttttgtttgtatacaggatcttactctgtcacccaggctggagtgtactggcatgattttggctcactgcagcctcaacctactgggctcaagtgatctttccacctcagtgtctccagtagttgggactacaaacataacgtaccatgtctgaataattctttgattatttgtagggatagagttgcccaggctggcctcaaacttttaactccaagtgatcctcccaccttggtctctctaagtgttgggattataggcatgagctacaccacccagctggcattcttaaatttgataaaacttagtatgtgtcctaacagaatacaccagctgcaaataagaatattgtgtattttcttgcttttgactggaaagttctgtactcatctgttaaacctagttggtctataatatggttttgatgttcatgtcctccaaaccttatgattaaatgcaatttttaatgttggatgtgagacctggtgggaggtgtttgggtcatgggggcaaagtcctcatagatagcttggcaccatcctctcagtaatgaaaatgtttatactccattaattcaaatgaaagcaggtttattagaagaacctggctccttcgcctcatacttgctctgtctctcatcatgtaatatgtgcagttactcttcgccttcaatcatgactgtaagcttggtgacactctcaccagaagcagatgctggcacactttctacagtctgctaaattgtgagccaaataaatattatttctttataagttatccactctccagtattcacctatatgcaaaataattgatacagtctataatgttgtctaggttttctgttttcttattttttgtttaatgtgaattttctattacggaaaatggggtcttgatgtctacaattattatgttgctatgtatttcttgctttacttttgtcaatatttactttatatattttggagccctgatattgtacatacacatacagatagatagagagatagatagatagatagatatagtagttatacatttgtggtaatatcaacccattttaccaatatatactaccaatgtttgtctcacgttagcacttgacttaaaatatattatgtctaaaacccaagtgtagttactattttcataaaatacaggtttttgcactatgtaattttcagcctatttgactcagtgctaaaatgagtcccttgtaggtggcatatggtttgctttttcttaagccactaaagcattttattttttctttttataatttcatttatttacttgtttattcatttatttttgagataggtctcactctgtcaaccaggctggtttgcagtgttgtgatcatggctcacagcagcctcagtttctcaaactcagaagattctctcatttcagcctctcaggtagctgggttacaagtgtgtagcatcacacctagctagttttttttgtatttatggttgagacagttttgccgcgttgccaaggctggtctcaaacttctgagatccagtgatcagcccatcttaacctctcaaagtcctgagattatatttttttctattaagtagtttaatttatatttaaaattatttattaaaaatgaagttactacttttattgtgattgttttatgtgttcctcagtggtattttttatatgttggtttattgccttaaatttcattttaattgtgtagtgatgtgcttcaattattttttatatcttgttttgcatagtttctataaatattatcttcataatcatcttgtgtattcgtctgtttttatgctgctaatgaagacatacctgagactgggcaatttagaaaagaaagaggtttattggacttacagttgtgtgtgactggggagacctcacaatcatggtggaaggtgaaaggcatgtctcacatggtggcagacaagagagggagcttgtgcaggaaaactctgccttataaagccttcagatttcatgagacttattcactatcatgagaccagcacagaaaagacctgcccccatgattcaattaccttccaccacgtccctcccacaacatgtgggaattaaagatgagtcttgggttgggacatgggcaaaccatatcatcttaaaaaatggagtttacatgaaacatcttaaaattaaaacaatatatttatatctcatgacaacttcaattgaatataaagattatacctctatatttttcagtttattaatgttaaaattattttatattgtgtattaacatatttatgcaggtttttattctgttttaaatattctacagaatagctttaagagttatatgcatcatcattataatagtaaaaatttctatatttgtatatttacatttaatagagagctttattttatatatggttttatgatgctgtccagtagtatttttaaacaaaatggacttattatagcagttcttactatatgtagagtctcactgtattactcaggctgacctgaaactcctggcctctagtgttctgatagccttggcctcctaaaactgtaaaattagaggcatgagccacggtgcctggccaccatgtaccattttttttggtagaactgtgctactggtgatgaacacccttaccttttattttggattttttaattttcatctttttaaagagaaatacatttaaatcaaatattattggttagaaatattttttccttttattacatcaaaatttgggaatttttatcttcaagtaatctctatgttatttttttcccatattcttcctctgagattttcttaatgaatatattgatctagttgatggtatccaatcacttttacattccatgttttaattttgttttggaagtttatatttttatgttatatattttagggtatgctaccacacatccattaattgtgttttgattttttagtatatattataattgtgcatgccaatattttaactttatataatttaagacattgtggagcaaaatcatatatgaattagccatatgtctttttctgatagaattatctgtatgtttgtttgcctgtataaatgttatccttgtatttttttaataacgtgtatatttgttgtgtaagtttgttgtgaatggttttctaatcctgtgtagatgtgaagtcataaaattattgtaatttcaacatcctatttatttgtgagtctatgtaatttttgtgtggtagaaacatttttggatttgaatataatttaaaacaatcataattatttatctcttttaggtattattgtttatttttgcttgtctaaaaaacacgacaaaatttaccacaaaatatttttaaatattcagtttagtcatattgtcttgacattgtaatgcaacatattgctaaaatgtttctatcttgcaaagctaaatcttaatacgtattaaacagctaccaatttttccttctttttttcttttttgagatggagtcttattctgtcaccctcactggagtgcagtggcgtgatctcagctcactgcaacctccaccttccaggttcaagcaattttagtgcttcagccttctgagtagctggggctgcaggcacctgccaccatgcccagctaactttttgtattgttttagtagagatggggtttcaccctgttagccaggatggtcttgatctcctgacctcatgatccacctgcctcagcctcccgaagtgccgggattacaggcatgagccaccgctccccagccaaaaccgcaactgagcttctttatttttacatcattttttctaacttttaggatctgtcagtttccttttgtattttttacctccacagtttccgtttttatgaaatgttaaatatttttgttctcgtcctcatttttgtgattttccatacttgtctctgttcctgttttaatcagtattattcaatttattaccaattcttaaaattaatgtataaatcttatttttttatggtttctttcagaaaattttatgatatttttggtgggatgatactgctatattttgtatatattataagctttcagttttttacattagaaaaatctacctgtcaaaatttttataatgtggctttgtcctggcatagtctgaaaacaattgtcttggctcatcattatggcagtttttcaaacatattcttaggacctgtattgtctgaaattttgtgttcagtttttagttaagagagtttattcatattactttgtaggagtcagtaatcacttgctacacctgttccttttctgtggtactgcagtctggcggctgctggaacatttctctttggtctcagtggactcaaactctcattccgaagtataccaccatttctgtcagcactttatgtcatgagagacagaaaacagtgtccaaaaaaagcccctaaaagccagaaatgataatgaatgtgccagtattttacctttcttttaaaacagaaatgaagagtttgcaatttacttctaaaggcactatgttatagtgggaagcaggaaaagctgtgttgggtaaatttagacttttctttttcttctatgtggttttttgcattgtgctcttctggaacactgcacacagtgaatgttcacatctgtgaacatttcccacagatgtattttggtttgtaagtttttgttacatttaaatgtctatgaaagaattagggtctgtggtattttgcaaaaccatcttgtttttgtaggttgtataattttataggtaagatttttaaactatatttatgtcagtatagtaagtggagtaaattattttaatttttttttaggtatatgtcctcattttgctcaagacatttggccagagcagggcgtggaagattcttttcaaaaagtaatactaagaagatttgaaaaatgtggacatgagaatttacagttaagaaaaggttgtaaaagtgtggatgagtgtaaggtacacaaagaaggttataatggacttaaccagtgtttcacaactacccagggcaaagcttctcaatgtggtaaatatttgaaagtcttttataaatttataaatttaaacagatataagataagacatactagaaagaaacctttcaaatgtaaaaattgtgtcaaatcattttgcatgttttcacacaaaacccagcataaaagcatatatactacagagaagtcctacaaatgtaaagaatgtggaaaaacctttaattggtcctcaacccttactaatcataagaaaactcatactgaagaaaagccctacaaatgtgaagaatatggcaaagcttttaatcaatcctcaaattatactacacataaggtaactcatactggagagaagccttacaagtgtgaagaatgtggcaaagcatttagccaatcctcaacactaaccatacataagaggatacatactggagagaaaccctgcaaatgtgaagaatgtggcaaagcatttagccaaccctcagcactaaccatacataagaggatgcacattggagagaaaccctacaaatgtgaagaatgtggcaaagcatttgtttggtcctcaaccctaactagacataagaggctgcacagtggagagaaaccctacaaatgtgaagaatgtgccaaagcttttagccaattcggacaccttactacacataggataattcatactggagagaaaccctacaaatgtgaagaatgtggcaaagcatttatatggccctcaaccctaactaaacataagaggattcacactggagagaaaccctacaaatgtgaagaatgtggcaaagcttttcatcgatcctcaaatcttactaaacataagataattcatactggagagaaaccttacaagtgtgaagaatgcggcaaagcgtttatatggtcctcaaaccttactgaacataagaaaattcatactagagagaaaccctacaaatgtgaagaatgtagtaaagcatttagccgatcctcagccctaactacacataagaggatgcacactggagagaaaccctacaaatgtgaagaatgtggcaaagcttttagccagtcctcaacccttactgcacataagataattcatactggagagaaaccctacaaatgtgaagaatgtggcaaagcatttatattgtcctcgaccctatctaaacataagaggattcacactggagagaaaccctacaaatgtgaagaatgtggcaaaacttttaatcaatcctcaaatcttagtacacataagataattcatactggagagaaaccttacaagtgtgaagaatgtggaaaagcgtttaatcgatcctcaaatcttagtacgcataagataattcatactggagagaaaccttacaagtgtgacgaatgtggcaaatcatttatctggtcctcaaccctttttaagcataagaggattcatacttgagagaaaccttaaaaagggtaaagaatgtggcaaagcatttatatggtcctcaacgctaaacataagaggatgcacactggagagaaaccctacaaatgtgaagaatgtgaaaaagcttttaatcctcaaatcttactaaacattagataattcacactggagagaaaccttacaagtgtgaagaatgtgggaaagcttttaatcattctcaaatcttactacacataagataattcatactggaaataaaccctacaaatgtgaaaaatgtggcaaagcatatggtccacacccctaagtagacataagaggatgcacactggagagaaaccttacaaatgtgaggaatgtggcaaagcctttaaatgttcctcaactgttactgaacataaagtaattcatactgaagagaaaccctacaaatgtgaaaaatgtgtcaaagcctttaagcagtcttcaatcctgagtaaccataagataattcaaactggaaagaaaccctgcaagtctgaagaatgtgggaaatctttcttttttttccattgcacctttattgtttattctgttcactgttcagaattttcatacagtctttctagaatcaagaagggtgtacagtggtattcctgtggctttctctcctctccagctcctctcttgttcagcagcctccggacccccaagggctaaggaatcagacacaccgggtttggatcctgactccactaggagccatgtgatctcagggatatttcttgatctctctgagctctttttcctttttctgcaatgtggggaaaaggctccctctctcacagagttactaccagaattcaatgactccaagtatccaaagcatctggcacagtgcctgggcacacagtatgcccagatgcaccttagcttccttccttctggcagggaaaagatacctgataaagccagagccagctgcttaggggcatttgctttataaagagcctggtccctttaacagaggccaagaaatgactctctaatggtggaatttcagacaccatagcatgggtgagggagagatctggaggcatagactatagaagtctcagaatcatttgaatccagccaggcagactgctgctgcttctgcccaggggcaaggctggtgatacagtttggctgtaaccccacgcaaatctcgtcttgaatccccacatgttgtggggagagacccagtgggaggtaactgaatcacaggggcaggtttcccatggaatgtgggaaatcttttaacctgtcttcaacttttattaaacataaggtaattcatactggagtaaaactctacaaatgtgaagaatgtggcaaagtgtttttctggtcctcagccctaactagacataagaaaattcatgctggacagcaaccctacaaatgggaaaaaattggcaaagcctttaaccagtcctcacatcttactacagataagataactcatattggagagaaatcttacaagtgtgaataatatggaaagcctaaaaaagtcctcaattcttaacagatataagattattcatactgaagagaaactctacaaatctgaaagatgtgcccagtgcctttgacagcatctcaaacttttctaaacaaaatcatgctgctgacaaatcctagaaatgtgaagaatgtgacaaagcctttaaatgattgttgcacttcattgtatgtaagatcatttatactggaaaaaactaccaatgtgaacaatgtggccaagcttctaaccaatgctcatagcttattgcaccggtaagcatttatatttgagaacaaatgtacaaatatagacaaagcaaaaaagccattaatacctgctcacatcttactcaaaatcagagttcatactgaataaaagcattaaaaatctaattaccgtcaaaagatcagaaaatatgtctttaaagtgcagaagcatatttattttgaaaaagcattacaaatatgaagagggttgtaatacatttacttgtctcacagatcttattgtacacattttgtactagaggaaaaccctgaggcagttattaaaattttgttcaacatcagggagtttatattgaagaaaaccctgcaaatgtaatgaatttggaaaaacattttttcaaaaactacaaattatgaaacaccaaagcgttcatactaaaatatatttttgcagatgcattaaatatgaaagatgttcaatccaaaattaagtctatgtaaatatcagggaataattcacagtagaaatatttagggcactcaaactttagacattacactaaatcagtgctgagtataggaaataatacaaactaaagttcgtgtaaacattatttgtatataactttaaaagaagaatattttttggagagttataattacaatcaaagtataacttttttttgaaaatacagaattttaaaaaagcaaataatggagttaaactcttaaattacttcatgctgttccatcattcctggtgtattcacatgtgaaaacatgtgactaattgtagctgcattaaagatatgagagattcttttttattaggtaggcctttatgactttttctatggaaaggtaaggacattaaaatgtaagatacatgatgaaaatttaagtagagaggctctttgggttaacttgtaatgttgagtgatgcatgaggtaggtgttcagagtaatatttttatgcattatcatgaaagaaaaactttttttttttcatggcagtttgatttttatttttattttaatttattttttatttatttattttttaaggtcacagatcaacaggatcccaaggcagaagaatttttcttagtacagaacaaaatgaaaagtctcccatgtctacctctttctacacagacacggcaaccatccgatttctcaatcttttccccacctgtcccccctttctattccacaaaaccgccattgtcatcatggcccgttctcaatgagctgttgggtacacctcccagacggggtggtggccgggcagaggggctcctcacttcccagtaggggcggctgggcagaggcgcccctcacctcccgaacggggcggctggccgggcggggggctgaccccccccacctccctcccggccggggcggctggccgggcgggggggctgacccccccacctccctcccagacagggtggctggccgggtgggtggctgacccctccacctccctcccggacggggcggctggccgggcagggggctgacccccacctccctcccagccggggcggctggccgggcggggggctgacccccccacctcccttccggacgaggtggctagcgggcggagaccctcctcacttcccagatggggtggctgctgggcggaggggctcctcacttctcagacggggtggctgccgggcagaggggctcctcacttctcagacggggcggttgccaggcagaggggctcctcacttctcagacggggcggccgggcagagacgctcctcacatcccggacagggtggcagggcagaggtgctccccacatctcagacgatgggcagccgggcagagacgctcctcacttcccagatgggatggcggccgggaagaggcgctcctcacttcctagatgggatggcggccgggcagagatgctcctcactttccagactgggcagccaggcagaggggctcctcacatcccagacgatgggcggccaggtagagacgctcctcacttcccagatggggtggtggccgggcagaggctgcaatctcggcactttgggaggccaaggcaggctgctgggaggtggaggttgtagcaagccgagatcacgccactgcactccagcctgggcaccattgagcacttgaaaaacattctttagttaacattaagttagtagtatgttactgtacttttatggaataatatacagtatatttttaaattatgtgtgaacttaacttttcaattcagcatttttaacatgttaaatactatcatgaattcattgaagcattatgccactaactttaacctattccaccttactcaatggtgtaggtaaaagatggtaacaatacactatttggtaagataatggactgacatctctagtaatctttttgtcagtggctttaaattgccaataagttaaagaatgttgttcctataggttaaattttattcttatttttacatttaaatttatttttcttaatttttgtggatatgtaatatgtgtatatgcttatgccatatatggcatattttgatacaggcatgtgatatataatcttagatgtaaataaattatggagtgtgtttgtgttagtgtaagtttgaaactatttttagccaaaaaaaagtaatattggaacaaaataaatcattttaagaaggtgtctaatttactagaaaaaaaccaaaattctcaaaattactgaaagtaaatctatcctctgtactttgtattaaatttattactgtataaccttttggcttatgcttcagaatctccccatgcaaattctctgttttaacttgactgttactcatgttagaaccataattttgtttgttcgtttaatagtttttttttcttttttttttccttttttttttttttgagctggagtcttgctctgttgcccagactggagtgcaatggtgtgatgttggctcattgcaatctctgcctttcaggttcaagcagttcccctgcctcagcctcccaagtagctgggattacaggttcccgccaccagcccagctaatttttgtatttttagtagagacaggattttgctatgttggtcaggctggtcttaaacttctgacctaaggtgatccacccacatcagcctcccaaaatactgggattacaggtgtgagccaccgtgcctggcctgtgtgtaatagtttatgaaatattcattatgtgagctggtctgtaagtataagaatgattttttttttaatttcattgttccatttattggggtacaggtggtgtttggttagatgagttaagttctttagtggtgatttgtgagaccctgatggacccatcacctgagcagtatatactgcaccatatatgttgtcttttatccctcccccttcccactcttcccccccaagtctccaaagtctattttatcattcttatacctttgcattctcatatcttacctcccacatatcagcaagaacatatgatgtttggttttccattcctcagttacttcacttagaataatagtctccaatatcatccaggtcattgcaaatgctgttaatttctttttgtggtgagtagtattccaacatatatgtatatgtcatagtttctttatctgtttgttgattgatgggcattttggttggttccacgagttcaaaattgtgaattgtgctgctggaaatatggatgttcaagtttctttttcaaataatcagtatttgggtttatttctgggttctctgttccattggtctatatttcaaataatgacttcttttcctgtgggtagatacccagtggtgagattgctggatcaaatggtagttctacttttagttcattaaggaatctccccacttttttccatagcggctgtactagtttagatttccactagaagtgtagaagtgttccctgatcactgcatccacgccaacatctacagtttttcgatattttgattatggccattcttgcaggaataaggtggtatggcattgtggttttgatttgcatttcccttatcattagtgatgttgaactttttaaatgtttgttagccatttgtatatcttttgagaattgtctattcatgtctttggcccactttttgatgggattttttttttttttttttttctgactgattcgtttgagttcactgtagattctggatattagtcctttggcagatgtatagattgtgaagattttctcccactctgtgagttctctgtttactccgctgactgtttcatttgccatgcaaaacctctttagtttaattaggtcccagctatttatctttgtttttactgcgtttgcttttggtcatgaaatttttgcctagccaatgcctagaagggtttttccaaggttatcatgcaaaatttttatagtttcaggtcttaggtttaagtccttatttcatcttgagttgattttcatataaggtgagaaatgaggatccagtttcattctcctacatgtggctagccaattatcccagcaccatttgttgaaaagggtgtcctttcccacattatgtttttgtttgctttgttgaagatcagttggctgtatttgggtttatttctgggttcactcttcttttggtctatgtgcctatttttataccagtaccatgctgttttggtgactagagccttatagtttgaaatcaggtagtgtggtgcctcgagatttgttctttttgcttagtcttgctttggctatgtgggctctatatgaatgttagaatcgttttttttaactgtgtgaagaatgatggtggtattttgaaggggattctgtggaatttgtagattgctttaggcagtatggtcatttccacaaatttaattctatccttccatgagcatgggatgtgtttctatttgtttgtgtcatctatgatatctttcagcagtgttttgtagttttccttgtagagttcttttgactccttcattagatatgttcctaagtattttatttttattcagctattgtaaaaggggttgagttcctgattatttctccatttggttgctgttggtaaataaaagaactactgatttgtatacgttaatcttgtatccagaaactgctgaattcttttatcagttctaggagctttctggaggagtcctcagggttttcaaggtaaattatcatatcatcagcaaacaggtacagtttgacttcctgtttactgatttggatgccctttatttcttgtcttattgctctaggtaggactccagaactatgttgaagtggagtgttgagaatgggcatcctttcttttttctgttctcagagggaatgctttcaacttttccccattctctattatgttggctgcgggtttgtcatagatagcttttattacatgaagttgtgacccctgtatgccaactttgctgagagttttaatcataaagtgatgctggattttgtcaaatggtttttctgcatctattgaaataatcatttgatttttgttttgaattctatttatgtggtgtatcacatttgttgacgtgtgtgtgttaaaccatccctgcatccctggtatgcaacccacttgattatggtggattatctttttgacatgttgttggatttggttagctagtattttgttaagaattttagcatcaatgtttgtcaaggatattaatctgtagttttcttttctggttttgtcttttctggttttggttgtagggtgatgctggcttcacagaatgaattagggagggttccttctttccctatcttgtggaacaatgtcaaaagtattggtaccaattctttgaatatctggtagaattctgtgaatcagtctggtcctggactttttttcttggtgatttttaaattaccattttaatttcactcttttttattggtctgttcagggtatctaattcttcctgatttaagctaggagggttgtatttttccaggaatttatccatctcttctagattttctagtttatgtgtgtaaaggtgttcatagtagccttgaataattttttgcgtttcagtggtgtcagttataatatctcctgtttcatttctcagtgaggttatttggattttctctcttcttttcttggttaatcttgctaatggcctatcaattttatttatcttttctaaggagtagctctttgtttcatttaccttttttattttttcttttaatttcaattagttatgttctgatcatggttatttccttttttctgctgggtttgggtttggtttgttcttgtttctctggttccttgaggtggaccttagattgtctgtgctctttcagactttttgatgtaggcatttagggatatgaactttcctcttaccatcttcgctgtatccaagaggttttgattggttgtgtcattattgtcattcagtttgaagaatttttatgttccatattggttttgtttttgacccagtgctcattcaggagcaggttatttaatttccatgtatttgcatggttttgaaagttcctttgagagttgatttccagttttattccactgtgctctgagagagtgcttgatgtaatttcaattttcttaaatttattgaggctcgttttatggcctatcatatgatctatcttggaaaaagttccattcgctgttgaatagaatttgtgttctgcggttgtaggattaaatgttttgtatatacctgttaagttcatgtgttccggggtatagttaaatccattgtttctttgtttactttctgtcttaatgatctgtctagtgctgtcagtggagtattgaagtccctccctcttatggtattgatgtctatctcatttcttaggtctattaataattgttttataaattttggagctccagtgttaggtgcatatatgtttaggattgtgatgtttccctgttggatcaggccacttacgattatatagtgtccatctttgtctcttttaaccactgtttctttaaaatttgttttgtctgatataagaatagctacccctgttttcttttggtgtccatttgcatgaaatgcctttttccatctctccacttttgagtccttatgttaagtgagtctcctgaagacagcagatagttggtgagttcttgtccattctgcagttctgtgtcttttaattggagcatttaggccatttccattcagtgttagtattgaaatgtgatgtacaattacattcatcatgctctttgttgtctgcatactttggtgtttttttttggggagggaaggtgaggggaatggagtcgtgctctgtctccagggtggagtgcagtggcttgatcttggctcactgcaacctccacctcccaggttcaagcgattctcctgcctcagccttctgagtagctaggactacaaatgtgcaccaccacgcccagctaatttttgtatatttagtagagatggggtttcacccccatgtctagaaattcaatggcaataaatattgttgcccacatattaaaatccaatatccaggaccaattttaaattcaatggtattggatagcagagctacagacccagaaatgtaaaatatgttctaaatattctaaaggttctatcagaaaacagtattttgaaattaaatatgtagaagctttcataatattttctctactgaacatggtactaggttgctaactggagaatcccagcaagtcatattacttttttctaacaaaacaggccttgctgtctctaaccctgatctgatctcctgccttgagcaaataaaagagccctggaatgtgaagagacatgagacagtagtcaaatactcaggtaggtaagcatgaatgaagccgataacacagatgacaggttcaaaggtcaaaaagaatgccagactttaaaatgtgatatgggatgctctgcttcagtggaaagatttcctaaaaagcctttttttttcctctagctctgaagtaggagcatttttgtcccatacccttaaattatttctaaggactctacttcctatttagtgattttcctttgagggtaccatgagaactaaactcctctttatggcttataaggtactgcatgatatacctgctcttccattgcttcgggggaatataaaaatatctcgagtatttttgaggaactgcatgttagattatttctcaaattttcccatcatgtctgaaatgtatgagagcagtggtgatattaagatttgtttcagaaatctcaggaacatcaatgacagaggttacttatttctctattttctgtttttaatattagcaatcctaactcaagtgatagctcattattgttttcatttgcagttgcctgttgttaggtgatattgaccactttttttatatacctattggtcatgtgtatatatttgctggcaaaatattttttgaatcttttgaccatttttctgttgggtttttattgttatacttgcctttgctttgaatttcctgtatattttgaatattaagcttttcttgtatatatggtttgctattgtgagcatgcaataaacattcaagtataggtatcattttcttataataaactatttttctttgagtagatacccaatgatgagacttttaaatcaaatggtagttctatttatagttgagactgagcatttttgtcatatgtgtgttggctatttgcatgtctttattgaaaaatgtttactaatgttatttgcccatttttcaatgggattctttattattatgatatttttgagttgtttgagttacttgtaaattctgaatgttagtttcattttggcacatagtttgcaaatatgttcatttattctgtaggttgcctatttaccctgttgattattttttttgctgtgccaaagctttttagtcccgtttgtctatttttaataataatataataaataataatacaataatagttttctttgttgtgtccttgcctaatgttggtatcagggtgaaactgacctcagagtgacttaggaagaatttcatttttgggaagagtttcaagaggattgttattcaaatacatttggtagaatttggctgtgcatttttctagtcctaagcttttctttgtcaagacatttttaattactgactcaatcatgctactcattattggtttgttcaggtactctatttctttctggctctatcttgggaggttgtatgtttccataaatttatttactctaagttttcaggtttgtgagtgtctagttgtttataatcatttctagtgatcttttgtattactgttgtatccattgtaatgtctattctttcatttctgattttgtttatttagatctctcttctgtttgtgatgaatctagctagcaatttatcaattttgtctttttgaaaaaccaactctttattctgttgataatttttattgttttggtttttatttcatttggttctgttctgatttttgttatgattttcttctaacttggaatttgtttttttattaatattctagttcctcgaagtgtgatgccaggtccttaatatgtaagctttctacttttttgatgcaggcatttaggctataaactgccctcttagtactatatttactgtatctcacagattttattatactgtgtttctatttccatcttttttcccacaaagttttaagtttcatcttaatattatttttgagatgggctttactctgtcacccaggctggaatgtagtggcacagtcttggctcactgcaacctccaccttccaggctcaagcgatctttttatctcagcctcctgagtagctaggaacataggtgcgcaccaccacatctagctatttttttgtatttttggtagagatagtgttttgccatcttgcccaggctagtctcaaactcctgacctcaggtgatccacctgcctcagcctcccaaagtgctgggattacaagtgtgagttaccacccctggccatccatgttaattatttcgtttacacagtgactgttcatgagtatgttgtttaaattctttgtaaatttatagtttctgaaatttttattgctattgatttgtagttttattctgtggtcaaggtagttaatataattttgttttgggggtacttttttgatttgccaactcttctatctcagtggtctctctaatgctgtgagtagaatgttacatttttccactattattgtattactatctgtctctttatataggtttaataatatttctttttaaaatctgggtgttttgatgttgggtgcgtggatatttagaattgttatatcctttcactgaaatgatttctttattattgggtgatgacctttatcctttttgttactgctttttatttgaagtctgttttatttgatgtaagtatagatactccagtttgcttttggtttctgtttgtgttactgtcttccaccttttacttttaatctacatgtgtcttacaagtaaggtgagattcttgtaggcaacatacagttggatcattttttcttattcatttcataaatctatgcatttcaatgaaggatttcattgatttatattcaaggttaatattaatatgtaaggttttgttactctcataatgttaatttttttctttttatctatctttgtggtttaataaagttctgtcatgttgtaatttgatttatttctttttctcttttgttttataagacctgttagttttatacttttatatgttttaatgatggtgaatatcaaactttttttttatattagaaatcccttgaacatcttttgtaggcccagtctagtggtaattagtcagggtaagattttatatctttttcatctgtgaaggttaatctagcttgatgtaaaatatttggctggcacttttctttcaacactctaaatgtgccatctcattctcttctaaccagtaaagtttctgctgagaagtgtgcttttagtctgatggggttttctttattttataattacttctttcactttcactttagatattcatcatgtgccatgatgaagtctgttttgcaatgtattttgctggtgattgctgagcttcctgtatatgtatgtctaattctattggtaaagttgggaagttttcatcaattattttcttacatagttgttctaaactttttgatgtgttttatttctcagaaacactgataatttttaagtttattcactttagtcgcaaacatctcacagtctttgtttattcttttctccttatttttgtctgagtagattttttataaaaacctctttgatggcagtcttacactgctagggtcatcagaaaggaaaggaaagggaaatagaagggaaccgccaagtgggtattgaagcaaaaagagctacaaggcaggaccctccattagaaatgcttatagaaggaccacctagtatgggctaatcccctctgggaaaccaagccccagtactcagcagaagaaatagaatggggaacctcatgaggacatagcttcctcccctcaggatggctagccaccaaagaaggaaaaatactttcacctgcagctaaccaatggaaattacttaaaacccttcaccaaacctttcacttaggcattgatagcacccatcagatggccaaattattatttactggaccaggcctttccaaaactaccaagcagatagtcagggcctgtgaagtgtgccgaagaaataatcccctgcactgcaggccatacatttcaatccctgtatctttaacctccttgttaagtttgtctcttccagaatcaaagctgtaaagctacattcttcaaatggagctgcaggtgcagtccatgactaagatctaccacggactcctggactggcctgctggcccatgctctgatgttaatgacatcgaaggcacccctcctgaagaaatctcaaccgcacaacccctactatgccccagttcagcaggaagcagttagagcggtcattggcccacctccccaacagcacttgggttttcctgttgagaagggggactgaaagacaggactagctggatttcccaggccaactaagaatccctaagcctagctgggaaggtgaccgcatccacctttaaacacagggcttgcaacttagctcacacccgaccaatcaggtagtaaagagagctcactaaaatgctaattaggcaaaaactggaggtaaagaaatagccaatcatctattgcctgagagcacagtgggagggacagtgatcgggatataaacccaggcattcgagctggcaatggcaaccccctttgggtcccctcccattttatgggagctctgttttcactcttaaatcttgcaactgcaaaaaaaatcaaaaaacaaaacaaaagaaaaaaatcctctttaaaggtctgaaaatttgggccatgcacggtggctcacacctgtaatcccagcactttgggaggccaaggtgggtggatcagctgaggtcaggagttcaagaccactctggccagcatgttgaaaccccgtcgctactaaaaatacaaaaattagctgggcatggtggcaggtgcctgtaatcctggctactcaggaggctgaggcaggaggattgcttgaacccaggaggcagaggtagcagtgagcagagattacaccgttacactccagcctcagcaacagagtgaaactctgtctcaaaaaaaaaaaaaaaaaaaggctgaaattccttttatgcctgtttcagtctattgtattgttgaatctttgaatgtattttctttttccttcaatctttcagtttcacaatttttgttttggtttcttttaaaagatatccatctccttggcacatttcccacttatactctaaatttatttatttatttttgatttggtttttgggtttctctcacatctctttgagcttcttttaaatatatattttgaagcctttttaaggtcttttaaagtaatttcaatgatttttttttcttagaatactggaggattattgtgttcctttgaaagtgtcataaaccgtgcttttctgtgtttcctgtgtctttgtgtgtctttttgttgatttctgtacatctagagaaacagttccttcattttatttttgaatttacgttcatttgagaaagcttttttttttttacgttattaccatgatgtttattgcatagagccatttggctttacttttgggtttgtgcataggaaagactctgtgtaagtttctcgagtataaatataatatatatatatacatatatatatatatatatatatatatatatatatatatatatataaaaccaatgttttactggcttaggagtcatcttttctcttaggttgatttttaattctaagtctcagaaaataatttatctattttgtgttggtcattgagggccagcactcctgacgtaaaagggtgagaaggtaggatggtggtgtatgatgacagattacttaatagttataatgtacattgagtgatggataccctaaaagccctgactttaccactatgcaatctatgcatggaactaaattacacttgtacccaacacatttgtataaataaattaaaaacatccactatttgggtttgctatcttgcttattcatacataaaaatacattataaatgtttcctttgacattattattgttacaggagttgaaattatttaggcagatagagcaaaaaagtcattggtaaagttttctttttaataaaaagaagtccacaaattatggtttttttttttgtttgtttgttttgttttgttttttttgttttaacaaagagcagcctgtaaaattgagctgcagacatagataagcaagctggaatcttgcatgaataaatgccggcagctgtgctgcagcttgctctgcagtgaacaccaagaaataagtattcagacaattacagctgaaagggaggggagcagctcctccaagacagtgctgctttaagattcatctgccaagtatttattgagaaggctagttgaactacaatttagacaaacaagaaacatctacaaggtggctatttggggtcgggtcatgaggcacatatggccttgtttataacatctaaaagcactcaaaccacattcttaggaggctgtgttcagcactccttattacaaattctattccttgtcctattttcagggtcaaggaattacagtttcatgcacaaacaacatacacacagtgcctcagtatttttccatgcctcaacctcaaatgccttgtacataagcttgaatgtattgtcatacacccctcacatttcccccttctttaattcttagaacatgcggattatccaatgcaaagtaagcttctatcattcttccctggtcatagttggttgagtggcagcacagagccatttgcagatgcctaaaagatacaaaaaaggataaacagtggctatcacccaaatttgtatgtttagcccagacaaccaagtatttgggttcaaccactgaaagtcttgtaataactgaagggtgtttgtaattgctgcaaccatcgcttaaactgtttatttaattcacactaacgagtagaaactcgagaagacaggtggtcgccgtaagccctgtgtaggtgtgccttcactctctcccaggtatattgggagctattatatggcataaatgtgacacagatggaattatattgctaatcacaatgtaaattttgacaagtaacgaatgcctgctgtggatcccctagccattcagtggcagcttcaagggcctctaggtgagataaaatatttttatcagtatttacatgtttttgaaattcatggattacattgtataccatgtggttcaccactgaggctgtatgaatagattccgtcaaagagacagctgcagtagtagcagttgttagtataataatagctgaaactaaaaaggcaattagagtggccagaaatttttttttttttgagtatgagacaatgcttttctaaataactgcaagatagaatcccctttccagttccgggttggatatacagggagccacaatcctgaccaccactttaaaataatgacatagggccgggtgtggtggctcacacctgtaatcccagcactttgggaggctgaggtgggcagatcacaaggtaaggagtttgagaccagaatgaccaacatggtgaaaccctgtctctactagaaatacaaaaactagttgggcgtggtggcacatgcctgtaatcccagctacttgggaagctgaggcaggagaatcgcttgaacccaggaggcagaggttgcaataaactgagatcacaccactgcactccagcccatgtggcagagtgagactctgtctcaaaaaaaaaaaaaaaaaatcatgacatagtttataattgtgtaatgttttgatgagacaagcatgtagcgtatcaactactggaagagacagtaatactataaaaggattgattctgttctgtgttaggaatatcctgcgcaaacaaaagtatataagggtgtatagcacaaatcaggactgtatcagtaacattattgtgcaaggagagggtgtagttgtgaccgctataaatgtaatcacttttattatgaaagaacccattcaaaaaagggaagacctagtttccaaatttgggtatgagcagggcttaaaacttattccccttttgattgtaatattcatcctgaaatcccatactctgaccaggtgatggaactattggatggagtcccaaatccaatagtctgatttgcagacatgagatatccatggggtccccagtcaagtaaggtgccattatcaaacagaggtccttgatgcggcacaggttgtctgcatggggaccactggacagcctcaaacttatgtcgccagtcttttctcagatggcatatcagaagatcaggcatttgtataatttcattagaaacctcagtaagattactggtaacagcagaaataaaagtcaagtttgcaggcttagcatcccttttgggctgatagtaaagatactcctgaggaatgagagtaatacacttaggtgcccatgtagagaaacagagaggaggattgctagacaataaagtcaaggagtcattaagtttaatccatcccaaatttccagttagggagtaagacaggggcatccatcgacctcccatccaagaagtattataagatgacaaaggcgggtcagcatcccaccacataataacattgaaaattgagggattcagaacatgactccaataaacatgttcttgagctaagcccagttggcaaagaacaagaattaccagccaccccaacatccatgtctgtcttaccttctcagaagctcccccaattaccatcagatacataagaaactggttctctgcagtttcaggggctcccatagatgcaagccagatagttccctgttggtccagtttctttagctgtccccaggtaatgtcaggtgccttccaagttatcactgtcagttttggtcgattctccaatgacaggtccttcatcatcaggaggggctttttcagtagtctctaactcatattatggcttcactcattttatggggatccactctagtcctgtagttcatgaaatacaaaccgcaccttgaccccattgcaatgcctcataaagtccctcccaattccctgtacaaatgtctcgaattaacacctttcattttgtgacctcaaacagcttcatcctatgaccaatagccatctggccatcttatccaatattcaaaaaatgaagagtaaataaaatttttgctcattctcgaggagagagctcccatattccccccttttcatttattaagatatgctttaagggtttgatgagcttgttcaacaatggcctgacaggttgagttataagaactatcagttttgtgttgtatgtgccaaagttgcaatgcatataaaaagctagtgctaagatagcaaggaccattatcagttttaatagtctgtggagggcctaaggtcataatagattcaaaaagataagcaattgcatctttagtttcttctccagtccatggagtcacatatatgaggcccatataagtgtccacagtaacatagagaaatttaaagcatccaaaaggtggatgctgagtaataccagtttgccaggtagcattaggtaccagaccttatgggttggcaccaagtcccaatgaaaaaagggagagagaatgctgttggcaatcaggacaagttttaataatcatgcaagcttgatcaagtgttaaatgaaacttgtttaagactgtaggcagactgggcacagtggctcacacctgtaatcccaacactttgggaagccgaagtgggtggatcacctgaggtcaggagtttgagaccagcctgaccaatataatgaaaccctgtctctattaaaaatacaaaaattagctgggcatgatggcatgagcctgtaatcgcagctactcaggaggctgagacaggggaatcgcttgaacctgggaggtggaggttgcagtgagccgagatcacatcattgcactccagcctgggcaacaagagtgaaactccatctcaaaacaaaaacaaaaacaaaagactgtgagcattctgatgaaaaaaggaatgatcagcttgagctcacaaatatgcaggacagtctgcaaacctcatctgtgtttgtaccagagcatcagctggagtgttccctgctgacaagggaccaggtagcccagaatgagagcgaatatgtgtgatataaaaagggtgatgatggggacaaaggagctcctgtgttgtgagaaacagggttagtaggggttcattagtaatgccttttagatgtgtgagatctaaatgagtaatactatacaccgcataagtggaatcactaattatattcatgtcttggtgaggaaaagtttgtaacaccaatattagggcacctaactcagcctattgagtagttttgaaatgttcctggattttgtgctgccaattttgcatggcatcttgccacactatagctgactttcccattttccttgaaccatctgtaaagacagtagtggtgtgaagcaagggctcagagacaacaatacatgcaaatttaacaggcacagtttgtaaaaagttcaggagcttagaggctggtaaatggaaactaatattaccaataaagttgatcattgcaacttgccaatcaagatcacaggctaagagagtatgaaattgttccttgcttaaaggtaagaaaagagtagtagggtcatatcatgacaattggatgcaatgtcggcatcccgttgtgagaagctattaaatctgtggtcttttgtatgtgtttagggagggggttacaagacaggtaaagctgccccaaaggagaaacatttgttccaacttgcccaagcattcctgtaggactttgaggggtattaaagatcaaaagatgtataggtctgtcaggatctagacccaatatacacctttgggtcaaggcttgctccacagcattaagctcagcctgttccagccaagagaggtcttgcagtgaatttaaagcagagtcacctttcagggtgtcaaaaagattaaagtaatttgtaggaatgcctaaataggatcatatccaactaatctttcctaggactcaatatcatgtattaagggttaagtgctgtggaagaattaattctgtaagttgtggcctgagggtagtagataagagccacagagtatatagagccacagagccatcagctggactttttcttgtgcaataatgagaccatatagtgacatatgctgtactaccattgcatgaagttgatgcagtaatgactgatgctgagcagctaccaaaatatcatccatatagtggaaaatttttgcctaggggaaggattgatgcacaggaagtaagccttcatgtacgtaaagctgacatatagtagggctattcatgatcccttggggtagaactgtccattggtgacattaaactggttgcagagtattgtaagtggaaacaataaaagcaaaattttctcgatcttcgggatgcaagggtatggttaaaaaaaaaatcctttaggtcaattaaaataagaggccagtctttggggatcataactggagaaggtaatcctggttgcaaaggccccataggaaacattacagcattaatagcacagaggtgatgcaataacctccactttcctgacctttttagaatggtaaaataggagtgttccagggactagtagtaggctcaatgtggcccgtgtctagttgttcttgtacgagacattggatgtgttgcaatttttccttcttaatgggccacttctccacccatagcaggctagtagttttccacttggttttgatacttttcaaaggagcagtggcccctaccaaaaagggggcaggacagagaggtttaagccccactgttctaggccatctcattaccacagagaaaatagaatctcttaagataaagggctgaacatgggtgaccttgccttccgggcccaaaagtggaagaatatgcctactttttaatggctgttgataccctccaacacccatgacagaacatcaggcaggagaggcccaatctgaaggccactgtcttttagctattatagtttgatgagcccccatgtcaacaattctcataaacataactccattaattgttacttctaagtatggtctatgacatgacactggagtactccaaaaaaccttcatgcctgagtggccgaatcctgaggccccacaggtctgttgaacattacttgaaggtaaggagtaagaataatctgagcaaggcaagtccctttagagatggcatggacccctgacacctgtgccataactttaatttctgctaaatagtctgaatctatgactccagagaaaatttgaattccttgaagtgtacttctgataatcaatccaaacgttcctctgggtaatgggccatagattccagtagaaatcagctggaccccatcttgctctttaagcaccatatctgatatgactgtgaggtccagccctgcgctgccagaggtggctgaagagaggttatggatgctatttctggtcctgactcagaggggaaagtcattccccaagtctgggaattggtgttcctccatggatttttctgggcattggaggtcttgcccctcttcccgtttcccaataatgggtttcatccttatcaaattttgaatttcactgattagcccagtgcttacctttgctgaatcgcaggcattcttgagagggtattttaggggcctttgatttctttgggactcccttctgttggcattctttggccatatgcccagtttggccacaattataacatgtggccccagtcatcactgcagcaaaagtctgagccagataagttgtaagtgcctacattctggcacgttttaataaacacaccgatttcagtggcagtggctcagactagggttattgctgcctgacaatccttattgcattttcaaaagccaattgcaacataagaagtttagcgacttcaggatgaggtacctgtctttcaattgcagcctgcaatcggttgataaattcaacatatgtttctgtggcaccctgtttaaccatcacaaaggaactctggaattgtcccatgagtatcctcttccatgcctgtatcgctagctgtgagcattgaggaaatagacggccatccacctgagcctaagcctgagctgaagcaaaaggccctgtctccaacagcatacatatcaagctgtatcaggatattatccaaattttgcaaggattgctgcatggctagatcactgtactctctccaccacacagtatattcagcagctgaagccaaaacttttcccagagttttccagtcatgcacagccatctcataaccatttcccagagcctcaaccatcccctgcgtaaagggtgaatgtacaccatttttgcagatacttctttttaattccttaaagacaataaaaggcaagcgctcatgccgtctcctattattttgaacaatgacagggaatgcactaaaaagcgcctcaggatcttccttcctcagtccctcctggaggcatccttctagtagggaggttttttgaggggacacggccatccagtcatataaatgttcactgcctggaggtcttatccaagaacagtcccttggacggcctccaatctactcaagggggatgggaggtgctattgcctgaatggggccaacagatgcaggtcgtgtgaagggtggaggaaaagagggcaatggcttttctattgagagaggaaaaggctccagtccgtcctcatcatcactagaaaaagtgtcttctttatgccctactgaagggagtgaagttgggggaggaactccttcctgttgttctgctttctgtgtccccttttcctttaaattttccgaattcccttcaggtgaagaaaatgggcaatctgactcaccacgatctggcatataaagagggtacaacacagaacatgccagactccaggtgatcaaaacggtaacattagtaaaatggacctgctcaaatcctcttttcaggcagcaatctgcctgctcccataactctaagtctaatgttccttggtcagggaaccaagggcattcctgccgaattaaaaacataagcttatgcaaagcttcagactctatggtgcactgaataaccttaagtaaatgttgcaccgttttaaaaaatactttctgctctttggacaactcctgatccatggtaacccgacccctggtattatagacgtcggtgctgtcctcctgaaaatgggtagggactgtcccttaccggtattccccgaagattggtgagtcatcctactccatgcataacttcaaggcaatcacgtcggagtcaccacttgatcatgtccgagtcaccacttgatcacgtccgagtcaccacttgcagcttgttctgcagtgaatgccgagaaataaatattcagacaattacagctgaacggggaagggagcagctcctccaatggagtgttgctttaagattcatccgccaagtatttattgagaaggcttgttgaactacaatttagacaaacaagaaacatccaccaggtggctatttggattcgggtcatgaggcacatatggccttgtttataacatctaaaagcactcaaaccacattcttaggaggctgtgttcagcactctttatcacacattctgttccttgtcctgttttcagggtcaaggaattacagtctcatgcacaaacaacatacacacagtgcctcagtatttttccatgcctcaacctcaaatgccttgtacataagcttgaatgtattgtcttacaacccccacgctatgccagtaggaaaaggggttgcctggggactatgcctgttcaaaatggtggctccatcttcccttttctttgtaaaccacatgtacagtaacaaccaagaaagggtgaaattaaagtaaaacttttgattgttgacttgtcaaactggatttgtatggattaataggtctagcacaggtagaagagagacaaatacttctggtttatctgatttaatgcaaatacaggcaaacctggctaagaaatgcttttcaccaaagtttgtctgcaatttgaacgctgtaggttaaacttatttaaaagtactctggacagattcacttgtaatataagcatgttgtagtttctggtgtttaggactgatttctgtttatttagttttctgaagagacacaagagacagccctagctactatcagacttcctagagacaaattgggcaaatgagccctacaaaattccatttactttaaatataataaataataatctctaaacataagaatttgaccagcgttaaccactttactttcccaatgcactgatacttctccttttttcttagcataacacaaaacaaacacatgaccacacactatccactctccagtgcagatcagagtaacaaaggcacaaagcaagcttcagaacacacagaccaccatgttcaccacatctacatttagagctgattaagaagagaagcaaaatcaatgagaagctgacattagtgactaccctgttttcagcacctattgtcacaagaagaccaaacactctcattttaagtcagagcattcacttttttggaaaaaaaaaaaaaagtaactttacagcatatatcctgatctctcactctttgcaagatgacactggctttgggcatattacagacacccttaagacacatcgcctggcctggcttacctgatacaatttttaatttctctgaagtaaactcaaattttaaacatgtatttctttattaacttatttcattaatttcctcggggacttaacagaaaatatattcaattttcattcacttaatcttaccacaatagatggtgtaacatatccagaagacagccatatgtaagacatgcccatactccgaagcatggaaagcttaacacaccagggacttgaggaatcaacactataacagtgcaaatacacaaatatttaaggaaaaatacgtcacccaacagacagcatctgtggtcaccactatccagcattctccaaaataagtagctgttaatggcttatctaaaagttggcttatatataattgtcaccacaaattggttctgaacataatttagattccaatttttgatattaacaacacagtaattatctggtaagatatatttatagctaacttgtaattagacttatgaatgcacgcatatgccttgggtcacagtgagagaaaaactcttgagttatttgtagagtaccttaagatttacattttcaaaacatgtccttaagcttagttttagaagtattcttcccagcatctcttcaccaaactgtatcagttttatttatttatttatttatttatttttgagatggagttttgctcttgtagccaaggctgaagtacaatggcacaatctcaaatcactacagcctctgcctcctgggttcaagcaattctcctgcctcaacctcccgagtagctgggattaccggcatgcaccaccatgcccagctaatttttttgtatttttagtagagatggagtttcaccaagttggccaggctggtcacgaactcctgacttcaggtgatccacctgcttctgcctcccaaagtgttgggattacaggcgtgagccaccacacccagcaacaattttaattttaataactgaggagtggggagggctttttaaagttttattcctttctattcagtttatcttatcctatacggaaatggaataaagtgtggtgtctgtcctaatgatatttatttgtggtgatgcagaaatatctacgctcccaagcaagagatgaaaaatcatgttctccccaaaatggggaaaccagtgttacctggggcccaaagagatgttcaggctacatctgtcaggattgataccataagagaggatcatctctcgagcacagtggggctcacctgagattttggtgagtcatgtggatgacatcagagacaagcattacccaaaattagagtccctataagactttcacataagatggtcttagaatatggtggcccaactcacacagaagaggatggctgtgcatccaagtgagactgatatttttttctcaggagccgaaatcttaatgtaggagatggccactcactaagtagtcgaagcatgccctgatggaactctctggtggtcagatttcccactgtctccctgagttgcataaagcacagaacaacttgcctgcactccagcttctagcatgtaccaactcagcagaaaacacatccctgtctattttgtttcaaaaatactttgtttgccataaaaaagtgaattaatatagtaaaagcccaaggactgcctagggtaggtagcaggtctgtcatcaccagaagtatttaaatgctggccagacaaatactctgtggaaataagtttcactctttgtgaaaggggtaaaataaatctttgtcttgggcactctcagatttagtgaagatcttagcatacaatagataaacaacaacttctgtttactaaataaactttattttcacagattacaggtgaagcaaaatattgatataactctaagacattaaggtatcacaagacaacttatgttctttatggggtttcaattaagaaattacatgaaaaataagtccatgaaaggagttctgatgctctaattagcatcagaactgctctgatgggcttaaaccattgtgaaagtcctagcttgcttcctactcaaagtctcttctcatgaatcctatgcttaaaagtcaaacagataaagcatcactacatcaaacacaaacttcaacactcttaacatttaggtgtaaatctcatctgaaaatcattcaaaagctcaggtcatctacaagaaatctgttctttgcagtttagtatcagtaaattaaaaggaaagcaggaaaataataagataaagccatttaattatttttgtaggtaagaacataacattggtttatcagttacatagtattttcatgcttcatccatgccaggtacttaatttttaaccaactataacacattacaagtggagaaatagctaaaaacatagaaaacatattaactctttaaagggtagagaacatgcccagttcatatacattgcctaatctagcattccaatcttagtaagacaccaccatccacccagctataaaatctaagatcaggaagtcatctatcccttccccataccatcccatcatcaagcctctcctacctcttaaacctctatcaaatccatctgagctcccgtctctactgtcactatgcttcaggccaccaatgcttttcaattttttcataaactagccttctaactgatcttattccaaacagaaggccaataattatttccttctaccaggtctatttactactatgggtaaaaatagtccgtaacattcaaatctcaccacactacttttggggccaacactttttacagctttccagagctcctacaagcctactctaacccctgcctacttcatcattcctgtcattcccctcattcagtgtcttttcttcttccaaacacactgtacttctcccacttccctggacacatccaccttttcaacctcagcttctgtacctgctgttctctgaagcattctttttcttcctgtcacccattcttcagatattagctcaaatgtcacttccacaggatgccttccttgacctgcatcccgacatcctccattcctcttccatacacaaaggccaaactttacttcataagttcttgtcatactttgagcagttaacactgatataagtgagcttttcctggctggatgagtctctttcactgtgatatgtcctctatgatattagcaactgtctatctttgcaatgcaagtaagtttggtggtaaagacagaaccttcacaagcagataatcagatatttatggaataaataaaatctgtaaatgtgaaaaaagaatcatgggaatggtaaatttgatagtgaaaaactgtctcttaaaaagaggctaggccggacatggtggttcacgcctgtaatcccagcactttgggaggccgaggcgggtgggatcacaaggtcaggagatcgagaccatcctggctaacacggtgaaactccgtctctactgaaaatacaaaaaattagctgggcatggtgacgggcacctgtagtcccagatactcgggaggctgaggtaggagaatggtgtgaacccaggaggcggagcctgccgtgagccgagatcgtgccactgcactccaccctgggtgacagagggagactctgtctcaaaaaaaaaaaaaaaaaaaaaagaggctaaatctaatacagaactgtacttagaaaaattaaattgtaaaactttaataagcttttaacacaaaatggctcttataaaacttatttttataatttaaatacaaatcaaattcagagaaacacaagttaagcctcctttaagttacttttggtttaaaacttttgagtgttttaaccaaatacatacagatttaactgaccaaatcacagaaaacctgtttgagatgttaaaccattgtaaaacaatccgctgaaccaacaattaaaagctctaaagtaaaagataaaatggcctaaaaaatctattttctgtatcataaaggaaaatatagaagcctcctcagaaataaaactaagttagaatattatgtctaaatgtatctgtcaggtatgaatctaaattctagttagcatgcagcacttattaattgacatttacagttagtaatgtatccttaatcaattaggatttcatgttgtataaaagacactaagtcacacacaatgctaactttttctttgttaaaaatttactctttgagccctctccctctccctctccctctcggtctccctctccctctccctctctttccacggtctccttctgatgctgagccgaagctggacagtactgctgccatctcggctcactgcaacctccctgcctcgttctcctgcctcagactgccgagtgcctgcgattgcaggtgcgcaccgccacgcctgactgatgttcatatttttttggtggagatggggtttcgctgtgttggccgggctggcctccagctcctaaccgcgagtgatctgccagcctcggcctcccgaggtgtcgggattgcagacggagtctcgttcactcagtgctcaatgttgcccaggctggagtgcagtgacgtgatctcagctagctacaacctccacctcccagctgcctgccttggcctcccaaagtgccaagattgcagcctctgcccggccgccaccccatctgggaagtgaggagcgtctctgcctggccgcccatcatctgggatgtgaggagcccctctgcctggctgcccagtctgggaagtgaggagcccctcttccctgccgccatcccatctaggaagtgaggagcgtctcttcccggctgcccatcgtctgagatgtggggagcgtctctgccccgccgccccgtctgggatgtgaggagcgcctctgcccagccgcgaccccttctggaaggtgaggagcttctctgcccggccgccccgtctgagaagtgaggaggccctcagcccggcagccgccccgtctgagaagtgaggagcccctccgcctggcagccaccccatctgggaagtgaggagcgtctccgcccggcagccatcccatccgggagggaggtggggggcagcccccgcctagccagcctccccgtccgggagggaggtggggggcagcccccgcccagccagcctccccgtccgggagggaggtggggggcagcccccgcccggccagccgccccgtccaggagggaggtggggggcagcccccgcccggccagccgccccatccgggagggaggtggggggcagcccccgcccggccagccgccccgtccgggagggaggtgggggccagcccccgcccggccagcaaccccatccgggagggaggtggggggctcctccgcccggccgccgccccatccgggaggtggggggcgcctctgcctggccgccccttctgggaagtgagcccctttgcctggccgccacaccatctgggaggtgtacccaacagctcattgagaaggggccgtgatgacgatggtggttttgtggaatagaaaaggggtaaatgtggggaaaagatagagaaatcagattgttgctgtgtctgtgtagaaagaagtagacgtaggagactccattttgttctgcactaaggaagattcttctgccttgggatgctgttgatctatgaccttgcccccaaccctgtgctctctgaaacatgtgctgtgtccactcagggttaaatggattaagggcggtgcaagatgtgctttgttaaacagatgcttgaaggcagcatgctcattaagagtcatcaccactccctaatctcaagtacccagggacacaaacactgtggaaggccgcagggttctctgcctaggaaaaccagagacctttgttcacttgtttatctgctgaccttccctcctctattgtcctacgaccctgccaaatccccctctgcgagaaacagccaagaatgatcaattaaaaaaaaaaaaattactcttgaaaagaaaacccattcaaagggttcaccttgtgtttcaggacacccaccttatcttctgggtatctcttttatttctaaaaatatatgtacctctattaaaggaaagttaaaattttgattgtgtgtatttatagaagtgctttgttgttgtttttaacaataaagtaccagggtaaaataacttcccctaaaacagtaaaaatggttctttttatgagtatgatacataatcaattattatcaagtaggtacattgcacatacacatatcaagcaagatttataccctgcaggtttctggttttacattcaattttaaaaccaagaaataatggaataaaggaaagttaaattacatataaaccaacacttctattaactcataccactagtgaaacaaaactctaaataagtagagaaaatgaattcacacattggagctctgaaatgttctgggtcttttatctgtgcatttatttttcccattgaatttaaagttcaagccaaaatccattaataatgtttagaattattaaaggccacagtgtgacagattttagtgcaaccaggcattaagaagcatgcttttctctttaagctgagccaacttttattttagaatttctgtaattcaacattctttcccaccaaaacacctaaatctttttcatgtagctgcaaacgactacatgacagatgtgacaaagttgttagtttatgtccacttcctttactgaatgtggagtgaaaggccttagttttcaatttacatgtggctcttctccaaaatcttaaaaaatctcatgtttatattagaaatcaacaggcaagttcaggcatggtggcttacacctgtaatcccaggactttgggaggccaaggcaggccaatcacctgaagtcagaagttcgagaccagcctgaccaacatagtgaaaccctgtctttactaaaaatacaaaaagtagccagatgtggtggtgggtgtctgtaatcccagctactcgggaggctgaggcaggagaattgcctgaatccgggaagtggaggttgcagtgtgccgagattgcaccactgcactccagcctgggtgacagagcaaaactccatcttaaaaaaaagaaagaaagaaagaaagaaaaagaaatcaacatgcagtagtcagtgagcaccaaccatgcaattgtgctaggtacaagagatggaaaaaatattcctgaggtgggagaaacatgttaacagataaattacagaagacagacttgacacatgggagtaaaagtcattagaaacagaaggcctaattatttctagaaaaggtagtatttgagatgggtctcaggagaaaagtaaatgttctttgctgggagaagaagatggagacacaacgaaaagaacccatgcaacagcagaggcagtaaataattattcagtgtggcagtgatgtggaagatagagacaagagccaagactagcagtttggtttggaagcagatgagagtctttgtaaaacaagttaaggggtttggattttcctttttgtagacaacatggtgccaagagatgtcattaggcaggcaagcaatgagagcagctttaggctttgaggataatgcctctggcagcaaggtggaaggttaacagcagtagggagaaactggtggcagaaaattaagaggtgtttatgactcagtgaggtcctcaggtcaggagtgattaaacagcccatgtcagtgattgaagcatggttttgaggagagcctggtgactgatggacatgagggtgagagagacatgcatcaggacagccagcagtaatgttcctggcctagtaggttgtgtgcatggtaatcaccttccagaaaggatggagattactttcatttttacaagtacttggcaggatgagggaattgtactgtgatcaggatgacaaaagattacagcttcagataagttgtaggtgaaaatatagagctggagttgccagtttataggttagaggggaggtcagaaaagcaccaggatgcacagggcattcagcaggaacagaactcactcccatgtatgggactgcaaaggttgctgcagagaacaggcattgggtacctggccactgataccaatgggatgcttacagtctctccactgatttaagaattttaggctgggcacgatggctcatgcctgtaatcccagcactttgggaggctgaggtgggaggatcacaaggtctggagatcgagaccctcctggctaacgtggtgaaaccccgtctctactaaaaatacaaaaaattagccgggcatgtggcaggtgccagtagtcccagctccttggtaggctgaggcaggagaatggcgtgaacccaggaggcggagcttgcagtgagccgagatcacaccactgcactccagcctgggtgacagagttggactctgtctcaaaaaaaaaaaaaaaaatttttaaaacaactattctcaagtgttgcccatgtctctgaggtaagtgggggcccacaccactttgggggcaactgtctcctttctgcaggcagccctttcttatctggaattcagtctcctcatcttcctgccttctcccttgcatatctcctgcttgtgtaatagggtggaaagtggagggcaggacaaagttcagaccagtggcactggttagctaaaagatcactcgtttcattctactagacagttctggtctgaggcctgggttctcagaacataaaattatcactgtctcctttattgcatccctgtattatccctatccctcttagccagggcagctggctgacatccaccctctcaagaggagatgtatggacagaagacctggctcagaaacactgctctatgaaaagggcagatagttatgtaagaattttgcaaaaacttgagaaattaaaataagggagactatgaatgcaaaaacattaactgtcaagcaagtaagagataattcaaagaattttttaaaaagatgtagtccacataacttaaatcatgaggaagactggcagatgacagcatcagagtggatttcctaaataactgaggaggtgactgggaaaactgagccacctaccaaaacagctttacagagccaatgcatctcaattgttgtagaagaagatgagttctagaactcttatttactctaaagttttcaaatacattgaacaccacttaatgttttcctcaatcccaagcttcttgtaaaactttgaccctgccaaccatggcatcttagaggcagataaaagcttacctactttctggaacttcagatttctaaatatagcacatgcaatacagggaatgcactcagtatgcttgtggatacaataaagtccactactatacctctcaagcaggctttgttgacttcagctctcctgacatttggggctgtcctatgcattgtaatatgtggagcagcatttctagtgtctgtacactaaatgccagtagcaccctttcccaaagcaagacactaaaaattttatcattctgtaaaggaaatccacagtggacacccacaaagcttcctgatctcaaaacatgccactttattccatatgtagattttgagtttctggaacagttattttatccttatgacaatcccatgaggtagaaaagctactgacaagatgcctgtcatattcatcaatggcagtgccaccaaaggctaaagtttcattttaaattcccttatactttcaaaatcaaccgaatttattttgaaaaaaatatggccttctttattaaaaataacaacacacatacacggaggtaaataagcagtatacatttaaagctacattgttttgagatcaagctgactctataaagcagctgtcccatggagctaagcggtagttaggaattgtggattctgagcttaatttattgtcagcccttgggtagatcataaagcagctataacaggagtcaatatacccacccaaccctaatagttttgctctgagtggaaatgtgaaatctttgctgaatgcttttgaaaaagcggagtgaaaataacttagtccaggaaggtacagcaaaataaataaggaatattttaaagtaattaaaccaccagaaatatctgatatataatcctaccccattgtctctgagaaaagggaaaaagagaaaaacacaaagcaagctatcaaaagcagatacagcttttaaaagttctatctaattaaccccactaagaaattttttggctacctggtgtatgccaggcactgtataatgtaggacagtggtttccaatctttttggcaccagggtctggttttgcagaagacaacttttccgcacatgtggcgggatggtttccttttgggatgattcaagcacattacacttactgtgcactttgttgctattatgattgcattgtaatatataatgaaataattaaacaactcaccataatgtagaatcagtgagagccctgggattattttgctgcaactaaatgttcccatctggaagtgatgaggggcagtgacagaccctaaggcatcagagtctcataaatagtttgcaacgtacatctctcacatgctcagttcacaatagtgtttgcactcctatgataatctaatgctgctgctgatctgttatgcaagtgatggggagtggctgtgaatactgatgaagcttcactcacccaccattcacctcctgctgtgcagcctggtttgtaacagaccacagactggtatcagtctgtgccctggtgttgaggaacactgatgtggggcaactacattgattgattgagtgagtgagtgggtgagtgcaatggcgcaatctcagctcactgcaacctccacctcctgggttcaagtaattcttctgcctcagtctcccaaaataggtgctattacaggcatgtgacactatgtttggttaattttgtatttttagtagagatggggtttcaccatgttggtcaggctggtctcaaactcatgatctcagtttattctcccgcctcagactcccaaagtgccaggattacagacctgagccactgtgttcttctgacaaccacatttattaccagccatttattaccaggacacctatgttgtgcagtgcctggcatacaccagttacttaataaacagctattgatctaatgcaggactaataaggtaaggtgtattttttttccttcaacatgctgtgcctgtttcagatgcaaataagacctcaggagtcggcctgaagagacttaaaataaaaaatgttcccccagatgggaacatttagttgtaggaaaatcaagcagtcacttggatggtgtaacaagttaggtatgaatgtattacctgtgccagcttagtgagatgcatgtttacatcacataacaaacacgtgtctgccatgctcagggcttagagtctaaatttctgatgagaaataaagtggtatctagacaaccccagagagtgatattccatacatccataagcattagtagcatttctaaaaattatcaaacatccaacaagtcttttaaaaacaagatatgctaacatgcaagcagtttagcagtatttctaaaaatgataaacagtacaacttcattcacctgaaatggagcacaagacccttctgaaggaattcatatccattcctgcaaaagttctgtggactcttgaaggtagcacagaactaagtgttttttgtgtgtgtttccaaagaggttttagccgagcctttggcctctaacagactctctgattaaaatatggcttagaaactctacctgcctacttgaaaaagcatcaaaactagagaatgcttttcacaggtgtgaaaaaatgaaaacaaaatcacattcttctctttgcaattccctttcccccaccttccacttctattaaatatacttcagaataattgtgcacaggtacagagaccactacatatctaaaaaaggaaaaaaccctcaaatatatggggatgcactggcaatcttgcctttgcggaaatcattttgtttcctccagacagaagtgtctcactattttcagcattctcatctaacaggcagtttccactgactttgaaaggggtaagcttgaatctaaactcttaaacaagaacgagggttcaattttctagtaatgaaaatcccagacatgtttttcaacctaccaaatcgttatatttttaattcacccttctttctctctccacaaacactaacatcaccacccacaaaagaaaaaggcaatccctccaattttccccaaatgtgcgctgctgctagctgggaagctgtgtagagttttgtaatggagtgtgaactgctgcccgggatctgggctcatgttctatctcctaaccagtaagaagagaaggaggacaaatccactgagcaggaaaaaaaaaaaaaaaaaaaaaagaaaaaaaaagaaagaaaatctttcctcctcatttataacctctcatggatgcagcgctgacgagggtcgccaggtgcccagggcgcctgccaagcggcccactggccagcgcgtttctgcgccgggccgggtccccgagctctgcagttctccgccctgcctggaaaggaagcggccccgccaggtagtgggatcggccgccgcgtcccgtcctcacccttggccccgagggggtgacatcctcgatgtgccctcggcccagaaaacgcgccgcttcccatggagggcgtcggcgacaggaaggacctcccctgctccttaacaaacgttagggtcgcagtttcctaagagacgcgactgggattgggggagggggtccaggcagagactagtgctgggggcagaggaagcgacactaggctgcaggctggtgtggaaggaaaaaaggaagccctggaaatagccacagatttttccagcgggagtaggccccccccgcatttttcctggactcaacgatggcacccggcaccgagccccccactcgcgcgaagaaggtgcactccacactgacggatccctgtaaaacacacgccccgccatcggaaggaccaggaaagataggcgcccccatggcaaggccctggcccccttctttcctgggcgccttaggtggtagtcggccacaccaaaaccgccagccaggaaagggccagggctcagggcttcctgctgccccttgactccagtgtcctctgcccaggaatttcaaatccgcagagcagggcgcggcaggcgcttccaccaaacaccccggctagagcaccccaggaggccgcctcctggccagcatccctgatgctttgcggctgctggggaaagcaggaaccctagtttccaggcttccccgccagagagggactggaaaggccatagaaggaaagttcctcattccataggggaaggatgccaggagagagagggcagaaggtggggagcagcgtcgggaagatgtttctggcttaggaggcttataccatccaagtcccggcggtgctataataaataaattcaccccagtattccgggaggccaaggcaggagaagcactcgtgtccagaagtttcagaccagcctgggcaacgtggtgagacctccgtcactaaaaaagacatttagtcaggtgtgggccacggctgcaattccagctactcgggaggctgaggtgagaggatctcttgacactatagtgagtcataagcttgtgccactgcactccagcctgggtgatggagcaagaccctttctcatagaataaataaatatataaataaactcggccgcctgggttgggccgtattcctaccctccaaaacctaatatagatgcatgtcaggtctttctagcacagcgctgcagagactgccactacgcgtgctgggtgctgcttgacatggccagtggctcagtaagaggaggagtaggagtgaaggagtggagaaagaggaggaggaaaagagaaggaagagaggaaaaagtagagagaaaaagggaggaggaaacaagaagaagaggagaggaggagaaaatgagaagacagtaagaatagaggaagaggagaaaataaacaggagaggaggacaaggagactagtagcaatgaggataaaatgaaagttgggaggaggagaaataggaggagcaggagaggaggaggagaaaaagagaaggagaagatgagaagggaggaggaggagaggaggaggaagaaaaggagaggaatagacgaggacaggagaaggaggaggaggagaaggagtagagaagaaggatgagaggagaggaggaggagaagacaaggaagagcagatgaggataagagtaggaggagaggaggagaggaggaggaggagaagagaggaggagacgaggatgagaggaggagggggaggagagggggaagagtaaaaagaagaggagaggaggagaggagaaagagaaggcaaggaggtggaggagaggaagaggagatggagagaaggagtagaaggaaagcaggaggaggaaaaagagaggaggagagaaggaggaggaggagaggaggaggagagaaggaagatgaagggaagaaaaggagaggaggaagaagagagaggagaaaaggaggaggaagaagagagaggagaaaatgaggaggaagagaggaggaagtgggggagaaagaggagacaatgatgaggaggagaggagggggaggagaaagagaaaaggaggagatggaaaagaaagagaaaaggaggaagaggagaaaaaaattatcactttgaggcattcagtaattatgactattgtaatcgcttttggaataaagtttaaacttaataggagagatgggaacaaagatcaaagatccagattatttcagagctcaatttcagagctaaaaaaaaaaaaaacgatatgtggtaatacacctgtggacgttgccaatacaaaagagttgcagtattttggttttggatctagccatgtgtcaccatacacaatgtatgcagtgcctaggagagagcagagagccacaacacttaggtgctgggcccagtgaaacatcacaatctctttttggtcagagcccaaacaatagaggagagccacatcacctagtttctaggttcagcaatacatcacgataccttctgagaggaagaccaaagcaggagtgccacatcacctaggtgagagccccagagatacggcacaatgccttctgtgggtagggctcaggaagaagaggaaagttacataacctaggggctacagccagctatatgtcacaatcacccgaaggggcagggacaatgcatgagaggagagtcacatcaagtaggtggtgagcaaagcaatatgtaacaatcagaagagagtgtcatcttctacatgctgggccatgagatatgtcacaacatcccctatgggcaaagcccaggtaagagaagagatacacatcaaatagttgatgggctaagagatacttcacaatgccccctgtagaaagagatgaggagaaataaatcagattgcctgtgtgctgagcccagggataagtcactatttcatctgcggacatggcccaggcaggcgaggagagttacatcacttagatgctgggaacagagatatgcaacaatctcttctataagcaagaccctggtaagaaaataaagatacatcaaatatttatggacccacagatgccccctttttgacagagtcaaggcaagaaagtcacatcaactttgtcctgggcccagcaatatgtcaaaataccttctgaagacagggccaaggcaaatgagtaacaccttggagctgggcccaggatatatgtaacaatctcccctgtgggcagaacttaggaagaagagaagtgtcacattagctaggtgctgagcccagggatatgtcaccatccctccaggcaagagatgagaatacattacctgggtgaggagtgcagggagatatcacaatcccctttttaggctgggcccaggcagaagagtcacattgcctaagtgttagaatgagcgatgtgtcacaatgccccttctgtgcagcaccaaggtaggagagaaaacttacatcacctgagtgcaagtcccagcgttatgtcacaatgcttcctgtaagaggcaccaaggcttgagaatagactcatctcacctaggtgctgggtccagcaatatatcaccattctatttgtgaaccaagccaaggcaggagagtcaaatcaggtgtttggcagaggcgtatgtcacaatcacaccttcaaaaaatccacggatgagattatcaatccctcacatgttctggttctaggtatgagagtcaacatgtcttgtatgttgtgtgaagtacatgagtcataatctcaactgtgaactggatctgtgcagcagcttctcaatgttttctgggcattgtgtccccttagataagtcgcagcctgacacgtgtgctaaattatggtttgagggtcaacaaatccatgcataacaaaaatccatgtatgagagtcaacattgcaacttttgactgcctctagatataagattcaaaacctcaacagtgggccatgctcatgtgagaggacaacaatctttacgcttgactgtgtctgcttactagtgttacaatctcacctttgagctgggctctgttagtacactctctgtaccacccaaagaatttatgagatacatggtttggctctatgtcctcacccaaatctcacctacaattgtaatctccacgtgtcaaggcaggaaggtaattggatcatgggacagtttctcccatactgttttcgtgatagtgagtgagttctcaggagatctgatggttttataactgttggaagttcctcctttattcactttctccctcctgccacctcgtgaagaaggtccctgcttccccttctgccatgattataaatttcctgaggtctccccagctatgtggaactgtgagtcaattaaatcccttttctacctaaattacctggtcttgggcagttctttatagcagtgtgaaaatgaactaatacaatatgatatgcatgagaattgcaatctgcattaagaccttcatgctgatatgagcccatgattgtacgtgtcactctaagctcagatatgagagtcaacacctccccagttggctgtgcctaaatagaagagtactcatttgcctatgagctgggtttagaaatgggtcactatcacatatgtgtccagatgttcacatatgactgacacaattccatctgtagactgtgtctatgtgtgagattcaggatctcaccagtgggttgtgtccatgtgtgaggatgactattttaaggattggcagggtgtgcataccagaaacatagtatctcttgtgtccgtggacctgtgatgacactctctgtaccacttgagggctttatgcaatatgcaagagcgtggtgaacctctgtgacccttgtacaaagaggacacccaggatcttaccttttatcctgtgcctagctataagagacagtatctctctcattggctagttcaaggtatgagagtcatcatcacatctgtgagctgggccaagatatatgtcacagtcactcttctggattgggagtaagcaggagagtaacattacctgggtttggggccagatgtatgtcacaatcttctgtgagggctcagcaatatgtcacaatgatctacgtattcaagactcagtcaaaaagactcacaaccttgtcgcggggtccagtgatgtgtcataatcttttctgttaggagggtgcaggcagaaaagaagagtcacatttcctaggtagtgtatgcagatatatgtcacaaggcccactgggcagggcccaggcaggagcctcttattttctaggtgttggatccagtgttatttcacaatacaccaaatatgtggggcctgggagaaaggagagtcacatcacataggtgctgggccaaaagatatgttataataaccctctttagcagagcccaggcagaaaaataaatgtgtcacatcacccaggtgataaacaaaaaggtatggcataatacccctatgggcagggctcatgcagaagagttgcaccacatagttgttaagataggccatacgtcacaatacacaatttatgctgagctcaggcaggagaaaagagtaacattacctatgtgctaggctcagcgatacatcacaatacctccttggtcagagcccaagaagtagaagagagttacctcacctaggtgctgagtccatcaatatgtcacagtactcattgagtgaagggcccaagaatgaggattgcatcatttcggtgaggggcccagagctatgtacccatactccctgtaggtagggcttaagaaaaaaggagagagtcacataacctgtcacataacctagacagatgagcccagccctatgtcaaaattacaacagtggtcagagtccagacatgagaggagaatcacaacacttaaatgttgggtgaaggaacatgtcacaatcccaactggggacagaagcagaaaaataaggagaattacaccatctaggtaatgggcccagagatacattgcagtgacccctgtgggcaatgaccaggcagtagaatcacatcacctgtgtgatgggcctggggataattcactctaccttctgtgagcatagcactggcaaacgaggagagtcacaacacctaggtgctggaatcagagacacgtcacaatctcttctaatggcaaagtccaagtaagcgagaagagtcacatcaaatagttcatgaacttagagatatgtcacaatgccccctgtgggcagggtccaggcaagagactcacatcatctaggtgctgagcccagcaatatgtcacaaagctttctgaggtcaggagcaaggcaaaaatgtaacatcaccttactattgggtccagagacacatcacaacctttcctgcaggcagaacctaaaaagaatagaaaagtcacatcaactcaatgctgggcccagtgataggtcacaatattccccgtgagcagatatcaggcagaagtgagtcacatcacctggctaattggtgcagagatgtcacaatgcttcctgtaggcagggccaagtcaagagagtaacatcacctgggtaattggtgcagagatgtcacaatgcttcctgtaggcagggccaagtcaagagagttacatcacctgggttctggacccagcaatatatgacaatgggccatgtgggaagagtataggcaggagaatcacataacttgggtgtggagcccaatgtcacaatgccttctgtgcagggtgacaaaacagaagggtagactcacattaactgaatataaagcctagtgatagtgatatgtcacaatgctgtctgtgggaagtgccaaggcagtggactagagtcccatcgtgaaggtgctgggtttagcaatatgtcaaaattccatctgtgggttgggccaaggcagaagtgtcaaatcacttagttgctggacagaggcataagtcacacagtctcacacgcagaaagatacaggtacaaagttaaaattcttgcatatgacctaattctaagtatgggaatcaatatctcctttattttgggcctaagtcatgagtcttaatggtggactaggtctgtgcgtgggagcctcgctttcttctgtgcactatgcctccttagtagagtcacagcctcacaggtgtgctgaatcctggtctgagagtcaccagcccatctgtggactggatccccatataagagtcactttttcaagtttcaactgcatctaaatgtgacactcagaacctcaaaagttggccatgttcatgtggcagtatgacaatctttattgtcaactggatgtgcatacaagtgtcaaaatatcacctgtgctgtgccttgtcaggaaacactttgtagcccctgagggctttatgcatgagagtctcaatatgctctgagacctccctgctggtctcaaagttctggtatggacccatggttataatttttaccctaatctcttgtctcagattcaccttctcttcagttggctcagtccaaatagaagtgtcctcacctacctatgaactaggtttagaaatgagtcaccatcccaactgtagcatatgacagaaacaattccagctgtggactgtatcaacctgtgtgattcaggacctcacctgtgggctctgtcgacgtgtaagagtgaaaatcctaatggatgttagggtgagaatataagaaacacaatctcatttgaatgctgggctctgtggtagcattttgttccttgctagggctttatacaatgtgtaagaaagtagtgattttctataaccttcatacaaagaggagacatgggatcttacccatttctctaatcccagctaaaacagatagtatcttttctgttggctggtgtgtggtaatagagtcatcattgcaactgttagctggaccaagatatatgtccctacctgtgggtagggagcaaacaggagagtcacatcacctatgttttgggccaggaatatgtcacaatcttccctgacagaagtgaccaggcagaagaataatatcacctgggtacttagccaggaatatgttacaatcacaatcccctcctgaaagctgggtgcaggatgcaggctgcagaaccacatcaccttggtaattgggctcagcgatgtgtcaaaatgctttctgtgggcaaagcccaattaggagagactcatcatctgtttgctgaggccagcaatatgtcacaattttccctgtaggcagggtgcaggcagaagaagagagccacatcgcttaggtgatgaatgcagaaatatgtcaccaggtcttctgtggacaggccccagccaggagccttccattttctaggtattgggcccagcaatatgtcacaatacccaaaacatgtggggaccagaagaaaaaaaaaaaaaaaaaaagagacatcacctagatgatggatcaagtgatatgtcacaatcttcttatttggcaggtctcaggcaataaaaatgtgtgtcatatctcctaggtgatgaaaaaacagtatcttataatacccctgtcttcacggctcatggggaagagtcacatcacctacttgttgggtgcagccatatattacaatatgcaatgtatgccgggcccaggcaggagaggaaagtaacatcccctaagtcctgtgcccagggatacatcacaatgcctccttgagcagagcccaagaagtagacaagagtcacattacttaggtgccaggtacaacaatttgccacaatacttcctgagagaaaggcctaggcagaggtctcacaacactttggtgagggaacaagaaatatgtaacaatgtccctggtaagtagagctagaaaaaaagataagcatcacagaacatagggccagtgcccacttatctgtcacaatcacaccagtgggcagggctcaggcaagagtagagagtaatataatgtaggtgctacagcaagcaatatttcacaattttcagtgtgggcaggtcccagaaagaaaatgagtatcacatcacctaggtcatgggcccagagatatgtcgcagtggcccttgtaggcaataatcagccagaagaatggcattgcatgtgtgctgggcctagtgataattcattattccttctgggggcctggcacaggcaaaagcagagagtcacaacacctagctatttggcccagagatatgtcactatttcttctatgggcaaagtccaggtaaaataacagtcacatcaaataattgatgcaaccagagatttgttataatgccttctgttggcagggcccatgcaagagagtcacatcacctaggtgttggacccagccatatgtcacaatacacgacgtattcagggctcaggcaagagatgatagtcacaccatttagatcttgaatccattgaaacattacaattttatattgagcaaaagctaagcagtctagaagagtcacatagcctaggctttaagtccagcaataccttgcaataacccctgagaggagggcccaggtaaaagggtaactttatttaggtgagaggcctagaaataagtcacaattatctgtgtgggtaaagatcagaacgaagagggaagttacataaagtaatagatgtgctgatatgtatgtcacaatcactctaatgggaagagctaaaacatgagaggagagtcacaccacaaaggtgctgcatattttgcaatacagaatgtatgcagagcccagaaaggagaggacagtcacatcacctaggtgctgtgcccagcaatacattacaatctcttcttggacacaacccaagcagtagaggtaatccttgctgctggacccaaaaatatggcacaatataccctgaaaaaagggcccaggtagcagtgtcacatcacctggggagggtttcagaaatatgtcaaaatgcctcctgtgggtaaggctcaggaagaaaagaagagaaaaataacctaggggctggggccagccatatgttaaaacaacctcagtgagcagggcccaggcatgagaggagggtcacataacatagatgatgtgccaagtgatatgccacaactcatactgtggacaggtctctgcaataaaggagagtcacataatctggctgacggtcacagagatacatcacaatgtatttatctcttgtccttacggacaggaatcaggcagaagaatcacatctcctctgggctgtgtcctgggataatttactctcccttctgtgatctgagcccagggagaaaaggagactcacattacctaggtgttggggccagaggtatgtcacaatgtcacctgttggcaaatatgaagtaagagaggggagtaacatcaaatagatgatgggtccagaaatatgtcacaattccccttgtaggcagaatctgggcaggagatacacatcacctgggttttagtcctagaaatacataactagatgcaatgtgggcaatgccaaggcagaagaataaaaaacacataccctaggtgttaggtgcagaaatatgtcacaatttcatgtgacattcctggacctaacacctagggtatatgtctttatggtgacatcctcactcaggtgcttggaagaagtgtatgtcacaatcagagctgcaggtaagttcaaggataagattaaaactcccacacatatccttcttctgggtatgagagcaaacacctgctgtatgttgggtctgagtacaaaattcacagtatcaacaatggactgaatctgtgcatgagaacttccgtcccttctgtgcactgtgtcttatttgtggaataatagctttacaggtgagttgaatcttagtctgatattcaccaacccacctgtgaattacttcgaagtatgagactcaattatctgacttttaacttcctcctaatgtgagattcagaacctaagcagtaagctgaattcatgtgcaataatgaaaatctttactatgagctttgtgtgcataagagtgtcacaatctcacctgggccagagatacattacaatctcctcctgaaagcaggaaatgggcagcaaagtcgcctcacctggatgccgagcccagcagtaaatcacagcattctctggactcagcttttggttcaggaacatgaaagagaggcacatcacctggtttctgggtgcagtgatgtgtcacaatctgttgccctcagagaagaagatgaacagaaaaggagtcacatcagctaggtgctgggttagtcacaggtcacaatcacccctgtaagcaggaaccaggccgaagtgagtcccaaaaatgtcccctgtgggcagcgccaaggcaggataataaagccacatcacctaggtgctgggtcgagcgataactcacaatcctgtatttgggctgggccccggctacaaagtcaaatcactcagttgctggccagagggatatatcacatttacacctgttggaatgtcagagaatgatatctacaatccagcacatatcctgtttctgagtatgtgagttaacacctcatgtatgttgggtcttagtacatgagttcatctcaacaataaactggatcagtgcataagaggcacaatccttccagtgcactgttttatctgagtgagttacagcctcaaaggtgtgccgaatattggtcttagagtcatcaacctacctgtggacaagattcacctatgagaatcaattttccaacatttgactgcttttggttgtgaaatccagagccttaacaatgggctgtgttcatgtgggaagatgacaatctttttctgtcgacttggtgagtgtcacaatcttgcctgtgtattgccctagggctttatacttgatgtatgagattctcaatctgctctgagacatttgtgctggtatgaatcatgatcattcctatggccttaagcccaagtatgagaatcaacatctctccagttagctgagtccagaatgaagaatcttcaccttcctatgagctgagcttaaaatgagacaccatcccaactgtgcttacatgtttatatatgatagctgcaatctcaaatgtagactgtgtccacctgtaagattcaggatctcaataatgagctttgttcaattgagaaaataatgagaaatacaacctcacctttgtcttgggctctgtgttgacactctctgtaccacccaggggctttctattaaatgtgagacagtagtaattctctatgaccttcatacaaaaatgagacctagggtttgaccaattttcctaagcctagctaagagagacagtatctttcatattggctggctcaagttatgagagtcattatgacacctgtaaactgaatgaagacatatgtgacaatcccacaattgggtaaggagggaatgaacaggagaatcacatcacctgggtgctgtgccagagatatttacaaccttctctgagagcagtggccaggcaagagagtcacatcatgttgttgctgggctggaattatgtcataatttgttctgagagtaaggaccaggcaagagaggcacagtacctgtgtttttagccagcgatatgttatcccctcctgaaagcaggactaaggcagcagagtcccttcacctggttgctgggcctaatgatatgtcacaatgtcttctgtgtctaggtccaatcagcaaatgcacatttcctactgctggctccagtgatgcttcacaattctttttattgggatggcccaagcagaagaggaaatctgaaacacctaggggatgaacaaaaagtcacttcccaataactctgtgggcaggacacatgcaggagagtcacatcacctagcttctgggttcagtgatatgtcacaatcccttctgtgggctgggcccaaacaaagagagtcaaatcacttgggtgctgggaagaggcacatttcacacctgcaagaaggtccaagaatgagattaaaaattccacacatgtccaaattctaggtatgagagtcaatgcttcctgtatgttgcttctatatacatgagccacaatctctacaatggactgaatccacttatgagagcctcaattttttctgtgtactgtgttcccttattagaatcacagtctcacaggtatgctagatttttgtctgagagaaaccaatcaatctgtggacaagatccacttatgagagtcaattttccaacttttgactgtctccaggtatgagattcagaagctcaacagtgggctgtgaaaggatgatcatctttactgtttgctgtgtgtgtgtaagagtgtcacaatcttacatttgtttagggccatgttaagacatgttctgtatcacccaagggctttatatggtatgcatgggagtcacaacttcctctaaatcctttgtgctgttatggacccatgatagtgtctgtagctttaagcccaggtgtgacagtcaacatctttctaattggttgtgtccagataggagagttttcacctgccagagctgggtttagaaatgagtcaccatcacaactccgaacagaaattcacaaataaatgtcacaattttaactgcagactgcatccatgtgtgagattaagtgcctcaccagtgggctttgtccatgtgtgagggtgacaatcataatggttgtcagggtgagcacacaagaaacacaatctcatctgcatgctggaccttgtgatgacactctctctaccacccaaggactttatacaatatgtgagagagtggtaaccttttataacctttgtacagaaaggaaacccaggatcttacccatttttctacacctagctatgacagacagtatttgtccccttggctggttcaaaatattagtcattatcacacctgtgcactggccaatacatatgtcaaaatactacctgtgtgtagggagcaaacagaagagtcacatcacctaagtgctgagccagggatatgtgccaatcttttctgaaagaaggggccaggcaagagagatgtatcacctgggttctcagccagggatatgttacaattccccactgaaagcagggcacagacaacagcaacacatcacttggattcagggctcagtgttatgtcacactgtgacctttgggtaatacccaggcgtgaaagacacaacacctggtttctgggttccacgatatgtagcaatctttcctacaaacaacatgaaagcagaggaggagagtcaaatcccttaggtggtgagtgcagtatgtcataaggcctctggtgggcatagctcaggcaggagtctctcatccagtataagttgggatcagtattaagtcacaatattcaacatatgcagggcccaggcaaaacagaagagttacattacctaggtgctcaatccagtgatatgttacaataaccttatttttttcttttctttcttcttcttcttttttttttttttttttttttggcagggcccaggcagaagagaagagtcatatcatctaggtgatgaataaaaaggtaagtcattattcctctgtgggcagtgcttgtgcagaaaatttcaccttgtaggtataggactcagcaatatatcacaatgtctgcagcgctttggaaggagaggagagtcacatcacttaggtgctaggcccagcaatacatctcaatcacttctttggcaaagctcaagcagtaaaaaagagtcacatcacataagttctgggtataacaatatgtcaaaatacccccgagaagagggcccaggaaagagagtcactttggtgagaatatcagagatatgggacaattccgtttttgggtattcacaaaaaaagaacgtcccataacctagaagctgggctcagctctatgacacaatcaccctagtaggcaggtccattaaagagaagactgccacatcacataagtactgggcagtgatatgtcataatccccatgctgatagacccagagacatctcacaataacctctttaggcagagatcaggcagaagaattacatcatttgtgtgttgcacctagtgataagccattactctcatttctgtggacatggcccaggcagaagcgcagagtcacattacctaggtgctgggccaagagatatgtcacaatcttttacataagcaaaaccaaggtaaaagggaagagtaacatcagatagtaggtgttaccagagacatgtcacaatgccccctgtatgagagaatcaagcagtaaaaacacatcactacattgcttaatctagtgacatgttaaaatctttcctgtgggcatgatgcaggcagaagatgagagtcatatctcctatgtgattgatgcagagatatgtcacaaggtctcctgtggacagggtcgagactgaagccttccatccactagggtttgggtccagtgatatgttacaatacccaaattatgcagggcccaggcaaaaaaagagagtcacatcacctaggtactgggtccaatgatatatcacaattttctattttggcagggcccaggcagaaagaaaagttacattaccaaggtaatgaataaaaatacatgtcataatagttttgtggacatgatccatgcaagagagtcacatcacctaggtgttggacccagaaatatgtcacaatatacaatgtatactgtatgcctctcagggctgaggcaagagatgatagtaacttcacttatttgttgagcccagctatacaatcattttttgggcaaagcccaagtagtagaggagagtcacatcacttcggtgctgggtccagcaagttgtcacaatacctgctgaggggagggtacaggcaagagagccatgtcacttaggtgaggggcccagagatatctcacaatacccctgtaggtagaactcaggaaaaagaagagagtcacataatctaaaagctgggcctcgctgtatgttacaatcagccagtggacaggtcccaagcatgagagtagagtcacatcacataggtgctgggccaagcaatttgccacaaccttcactgtggacaggtcccaggaaaaagaagagtcacatcatttaggtaacaaaacctgagttatgtcacagttacttgtttgggcagaggtcagaaagaagtatcacacaacctgtgtgctggactaagcaacacgtcactctctcttttttaggcatggcccagggaggagagaagattcatatcacctaagatctggattcatggataggtcccaatttcttttttgggcaatgatcaggtaagagagcagagtcacatcaagtggttgatgggcctggagatatatgacattgccccctatggacagggaccaggcaggagactcacatcaccttggtggtaggacgagcaatatatcacaacacgttttgagagcagagccaaaagaggaacaccatcttggtgttgactgcagcaatatcttacacttttttgtgtgtgggcagaacctataaagaagggaaaggttggccaggcaccgtggctcatgcctataattctaacacttagggaggccgaggtggacagatcacctgaggtcaagagtttaagaccagcctggccaacatggggaaaacctgtctctactaaaaatacaaaaattagctgggtgtcctggtgggtgcatgtaatcccagctactcgggaggctgaggaaggagaatcacctgaacctgtgaggcagaggctgcagtgacctgagattgcaccactgcactctagcctgggttacagtgtgagactccatctcaaaaggaaaaaaaaaaaagaaaaagaaaaatcacataagctaggcgctgggcccagttatatgttatagtcacccctttgagaagggaacactcaagagaagagactcacatcacctctgtggtggacacagagatacttcaccatgctctctgtaggcagggccagaacacaagagttacataactgcggtgttagaccaagcaacatgtcacaatggctgatatgggccagacacagtcaggagagtcacataacctgggtgtgggactcagttatatgtcaaaatgcccactgggcagcgacaaagcaggagaggagattcacatcacctggatgtaaggcccagtgatgttacaattcccctgttagcagtgataaagcatcacctaggggctgagtccagtgatgtgtcacaattccatctgggctgggtcaggcagatgtgtcaaaaaggttctgtgaaggtgcatatgtcacagtcacaccttcaggaaggtccagtaatgaaattaacaatctcacacatgtcccggttctaggtatgagagtcaacacctgtgtgttggatccaaatagatgagtcacaatctcaacaattgacttgaaccatgtgtgagatcctagtttctagttgcattactattagtaccagtacctattaattcttccacattctacatctttgttctgtatgaatgtgcatacaaatatcgatacatatacaaggttatatgagtatttctatgtaaatacgtacacaaaaattgtacctcaaaaaacatttttcaatcttttagcatattctaagggtgcagatatagaattatttcccttctctagctcagtagcatgtcagaatgggacatagctatacaatgttatttgtatagacaaacaaaacttcactttcgggcaagttctgaaaaataagctgatagtaaaaccatgtaacactttctgtccaggttagcatttctggaccttgtttttcttctcagagtatgcatgagctattctcatccactactggtggcccgtcttgattaaatctatagttgctatttagagaactggctgactgaatccacctgggctcatctgagtgactgactgaaatcacctggcctgaaattattggtcaattaaaatcatctgggctcaaatagttgctgactggagctaaattgaaatcacctggacttaactaattgcctgattttaatctcctgggatcagctaattgactgtaattacctggtttgagttaattggctgattgaaatcaaaagtgctgacctaattggctgattaaaatcacctggaatgaggtaattgactgactgaatttacctgatctgagcaaattggctgattagaatgacctagaccaagctaattggctaattgggataaactgggctaagctgattggctgatagaaatcatcagggctgagtaaatgggctgattgtattcacctgccctgagaataagtagggaaatgacctctgactttgaagttttttttacaagacatactcataaatggacattacatagacatatttatatatctgtatgtgtttgcatatgcttatctatctacatatacctgttaataaatattcaagttaaagtgtgcaaagaaatctgaaatttgctttcaatattgcagtctatcttgaatttacagaccttggcttttctacccatattcaataagtcacttcttcagccaaccaaaccaattacagaattgtgttccaatgtcacaagttcaaaaacaaagagctcctgaaaagatgtaagctttaaatggaattagcattttcaatttttgtttgggcctttaatttaaagctagtttatctctgttcctgtgttaatcagaatgaaaagaaatatttttgacttggcattgaataacacttgtggttttattaaatttcttgcttacagattggagcaacaaaaatttttttcttttttttttttttttttttttttttacagagtttcactctgttgctcaggcatgagtgcagtggcaggatctcggctcactgcaacctctgacatctgggttcaagtgattcttttgcctcagtctactgagtagctgggattacaggtgcccaccaacatgcccagctaatttttgtatttttagtagagatggggttttaccatgttgaccaggctggtctcaaactcctgacctcaaatgattcacttgtcttggcctcccaaagtgtgttgtgagccaccatacccagccaaaaaatactttctttaaacatgttaaatgcagctaaattcacatcagagtattcttccatttgtgtactcttgtggatatactttagcgaacaaataagattttacatgtatggaaatttatttttatataactatcagtaaaaatacctatcaatgctttgaaattctatatctttattctgtataaatattgaaataatgatagatagacctggatagaaatacactgtcatgctcagggtcaggttacatccccagctgagagccaaggggagtgggtggatgtggggcagggagctggaggaacacttgagagacagcaggtaaatgagacatggctttattcagcagccccttcacagggtcagtgttacatttatacactacacaaacaatagtggctgagtgccaggtggtgagcttctctatgttatgtctacatgaatatgctttattcagcagccctttcacagggtcagtgttacatttatacactacacaaacaatagtggctgagtgccaggtggtgagcttatctatgttatgtctacatggctgtggttatacaaagctgtgcacctgtgccacaaacctgctgagtcatccagactgtttacctcagcctatgtctgctgccctatgcctgcttggttgcagcaaagccattttctttacatatacatgagtagataaataaacatatacgtacaagattatataagtttatctatgtaaataattgtatatgcaaaaaatgttcatcaggagacattgtcaattccccagcctatcttagaaacacagatgaagactttacttctcacctatatagctccataccatctcagactgagagacagccatacatatatacatcaacaaagcttcacacttcagggcatggcctggatataagcttccagtactgccacatgaagctttatgtgcatcttaacatttcagggccctactttctttctgtttgtatttctgtgttattcacatgtgccatctttgttctcccttgatgcctctgcttcctaatttaactagttgtctgattatatccacctgagctgtgctaagggaactagtgaatgaagatatgctagtgaatgaagatgacttctgatctagattttttctgaagtgttttactagacatatgcacaaatggacattacatagccatacccatggggtccacactgtgtttatatatatgtacatttcccccacctacttgatatgaaggtatatgtgtgcagaaaaataacacaaagtaagcatggtcagaggttatattaatttttttcaggccatttgaatgcaatcagccaattagttcagtgatgatttattcaattcaagctacacaccagctgatattttaaaaataaatgtgaaaatgtgttttgttatctggaacacggaggtttttctttctgggtctcgttaagttagcccaaagtggctctgtacattcaggtagaaacatctagaaatgctcaacaccagtcacctagctttcctcaaaaagaagcttttgccgagccagtaagaattacctttgtcatttcagtgaatgttcactctatcctggttaaaatgtggccaggtactatgtaccattatatttgctttcagtttcacaatctatcttctaaaaagtaacctaaactttctctctcttaccacaaaaaccctatttcagcctcagagatgataagataagagtgtacttttacatcgtgcacgcattgggaaaataataaacagcccctgtcttgactgaggccataatgagaaataataagtatactcaaattaaggtgaggacctttggactggggctggttcatctctgtccctatgtacaagataaaggaaaaggtcaaactgaaaatgggaatgaatgacattttcatctctcagaagtgagcaacaaagaccaatgttttctttgtaaatgataaatatagcagaatgtttgcaaggctgtatctttatttgtgtactcttgtagatatactttatagggcaaagagtttatacttgtatgtaagtttcttcttctgctactgttagtatcaatacctatcaatactttcactttctataaatttattctatatcaatatagatacaaagattaatatatctgtatacagatatacataggcagatataaaaacactcacagaattatatgtctatgtaattatttatatttacaaaaaattgctgggcacggtggccaacgcttgtaatcccagcactttgggaggcaaatgcgggcagatcacgaggtcaggaattcaagaccagcctggccaacatagtgaaaaaaaatacaaaaaaattagctgggcgcagtgacgagcacctgtaatcccagctacttgagaggctgaggcagaagagttgcttgaacctgggattcagaggttgcagtgagccgagatcacaccactgcactccagcctggttgacagagtaagacttcgtctcagaaagaaaaaaaaatgtactccaaaagacattttcaatcccatagcatattataagaatgcatatgtagaattacttctcttctctttggctcagtagcatgccagaatggaacatagctatacaatgtttttgtataaacataagcaatgcttcacctttagggaaaagaaccgggaagtaagctgacaggaaacccatgtaatactttctgtccacattagcacttaagaacacttattttcttcttgttttatgcatgcatcattcacatctaccttcctgggcttgcctggatgaatacttagtcatcacttacataattggctgattgaatccacatgaactaaacaaataggctaattgaaatcatgtgagctgagctaattggctggctggaatcaccttggctgagctagtttactggttggaaatacatgggctgagccaatttgctgattgcattcacctttcctgagggggctgtgtaggaccgatttacttatattttgggactggtttactcatatgtgattcagctttattatattttgggacctttttttataagatgaactcatagatagatatcacatagacatatttatatgacccagtgtgtttgaatatatttatctacatatcttatatctgtatataaatctacagaaaaaagcattaaaagaaagttgtaatatgattccagtatcacagtctatctttggcttttcaactcctacctaaaatcatgtctctagccaacaaaaccaaaagacaagatggtattcccttttcgcttaaaacaacaacaacaacaacaacaacaaatagtgcccctgaaatactggaagctttaaaaagaattattcagcattttcaatttgagtgaggatctttaagctgaggctagataatctctggctttgtgctcaccagaattaaaagggtcatctttggcttggcaataaatgactcccatatcatataaagcccctgagtgttacagatagtgttatcacagggaacaatatgcaggtgagattgtgtttctcatatgcacaccccaccaaacattagaattgccaccctcactcatggaaagagctcactgttgaggtccagaatttcacatgcaaatacagtccacagttggaattttgactgtaatatgtaaagacctagccacagttggattagtgacatatttctaagcccagataagaggcaggtgaggactccagtatctggacccagccaatttaagagatgttgactctcatacctgggcttggggcagcaggtatggtcatgggtccatacaagcatgaaggactcagagttaattgtgattgccattcatattgtataaagtcctttggtattatagacagtgtagaaatagaaaagaacaacaacagataaaacaatagcaagtcactccaagtattgtgggaacaaacgaaattcaggttagaaaaaaaaaacaggaagaaggtctgagtagtgccaggtactcaggaggccgagatgggaagagcacctgggagagaccagggaggtcaaggccacagtgaatcatgattgcatccttctcctggacctgaacggtactgctgccagtgagatttatctggttgaccttagacatggcaaggcgagacccatctggttgaccttagacatggcaagctggcagctaagtccaatgctttcagccaacatctgtctcaaattaaaaagccaacagtaaatatataacaataacaaagatataataattaaaaaccaatacataaataagtgggagtgaacaatagtaaaaggtaattaatatcacaattaaggtctctctctctttctctctctgtttgtcacacccaggcttgagtgtgaaaaaatataaaccaaaatgtcaacttcagcatgcaggaaggagcataggagaatagagagaaaaaagaacaaagaagaaaaataacagcaagtcatcctaagtattgtagaaacaaactgaaattgtagttagagaaaaaaaaagaaagagagaaaagtaaggttctatctgtcgcacggactcgagaggccgagatgggaagaccaccaggcaagacaggggagattgatgccacaatgaatcacgatcgcatttctcttctgagcctgaactgtactgctgctggtgagagccatctggtcgaccttagacatggaaaggcgagagccatctggttgaacgtagacatgacaagctggcggctaagtccaacgcttgtagccgacatctgtcccaaaataaataaatttttaaaatgagtaaatatataacagtaacaaataaataataacgaacaatattaaagaccagtacataaataagtgggagtgaacaatggtaaaaggtaattaatatcacaattaagatctccttcctctctccatttgtcacacccaggctggagagtgacaaaaaataaaccaaaaagtcaacttcagtgtgcaggaaggagcataggagaatagagaaagaaaagaacaaagaagaaaatcaacggcaagtaactctaagttttgagaaaacaacctaaaattagggttaggaaaaaaaaaaaaaagcagaggaagaaggaccctgtcatcccagctacgtgggaggctgagatgggaagacaacctgtgcgagaccaaggagatagaggccgaagtgaatgatgatcgcgtccttctgctggatctgaatagtactgccgccagcgatagccatctggtagacctaagatatgggcagacgagagccatctggacgactttagacatggcaaggcgagagcgatctggtcgatcttcgacataggaaggtgagagctattttgttgattttagacatgagaaggtgagagccatctggtagaccttagacatggcaaactagcagataagcccaacgcttctggccgatatccatcttaaaataaatttaaaaaccaacagtaaatatataacaataacgaagaataaaaacaatattaaagaccaatacataaaaaagtgaaagtgaacaatggtgaaaggtaattaatgtcaaaattaagatctcctcactctgtctctctttctctctctctccctccttgtttctctctctcttggtttgtcacaccaaggctggattgtgacaaaaataaatcaaaaggtcactgtgcaggaaggaacataaagaaacagagaaagaaaataacaaagaagaaaaacaacagcaagtcactctaaatattgtggaaacaaactgaaattgaggttagaaaaacaacacaggaaggtccaagtagtcccaggtacttgggaagccggagatgggaagaccacctgagggagactggggagattgaggatccagtgaatcacgattgcatccctctcctggacataaatggtactgccactagtgagatccgtctggtcaaccttaggcgtgggaaggcgagagccatctgatcgaccttagacctggcaagctggcggctaattccaatgcttgcagccaacttgtgtctcaaaataaatttttaaaaccaccagtaaatatagaacaataacaaataataacaatattaaagaccaatacataaataagcgggcgtgaacaataatgaaagataatatcacaattaagatctctctctctcctccgtttgtcacactcaggctggagtgtgaccaaaaataaatgaaaacgtcaacgtcagcatgcaagaaggagcataggagaagagagagagaaaagaacaacgaagaaaaacaaaagcaaatcacgctaaatattgtggaaacaaactgaaattggggttagaaaaacaacacaggaagaaagttcatgtattctcaggtacttgggtggcccaattggaaagatcacccaggtgcgaccagggagattgaggccgcagtgaatcacaatcacatctttctgctggacctgaatgatactgccgccagccagagccatctggacggccttagacgtgggaaggcgagaaccatccgttcgacttcagacatagcaaggcgatagccatctggtcgaccttagacatgggaaggtgagagccatctggtcgaccttagatattggaaggtgagagccatctggttgaccttaggcatggcaagctgtggactcattccaatgcttctggctgagatgggaagatcacctggatgagactgggaagatcgaggctgcagtgaatcacaatcccatctctctgttggacttgaacagcactgccgccggtgcgagccatctggtcgaccttagacatgaaaaagcaagagccatttgtcatgtctccacctcagacattacaaggtgagagccatcttgtcaaccttagacatggcaaggcgaaagccctctggtcgacctcagccatggcaagaggagagccatctagtcgacttcagacatggcaaggcaagagccatgtggtcaacctcagacatgaaaaggcaagagccatctggtcgacctgagacatgacaaggtgaaagccatctggtcgatctcagatatggaaaagtgagagccatctggtcgaccttagacataccgaagcaaatgccctgtggtagactgtagacatggcaaagcgagaactgtctgggcaatttcagacatggccaggctagagccttcttgtggaccacagacatggcaagaggagaactgtctggtcgacctgagacatgaaaagatgaaagccatctggtcgaactcagacatggcagagtggcatctggttgacctcagacacagcaaagcaagagtgatcttgtcgacctcaaacatggcatggtgagagccatcttggccaccttagacacggcaaggtgagagccatcatgtcaacctcaaacatgggaacacaaaagccatttggctgaccttagacatggcaaggcaagagccatctggtcgacctaagacagggcagggcgagggccatctggcccacctcagaaatggcaaggtgagagccatctggacatgtgacatggcaaggcaagaactatctcgttgacctcagacatggcaaggcaagagccatcaggaagccctcaaacatggcaaggtgaaagccatctcatcgtccttagggatggcatggtgagagctatcttgtccactcacacatggcaaggtgagagccatcttgttgacctcacacgtggcaaggtgagagccatctggttgaccttagacatggcaaggcgaaagtcatctggtccaccttagacagggaagggtgagaaccatcttgtccacctagacatggcaaggcaagagccatctggtcgacttcaatcatggaagctgagggccatctggtcaaccccaaaaataggaaggcaagtccagctagtcaatcttagaaattgcaaggtgagagttatctggtggaacttagacatggcaagctggtggctatttcagtgcttgaggctgacatctgtatcaaaataaatttaaaaatcaactatatatataatatcaaacaatattaaaacccaaataaggtgggagtgaacaataataaaaggtaattaatatcacaattaagaactcctctctctgtgtgtgtctttctctctctctctttttgtttgtgacaccaaacggaagggtgaagtgtgacaaaaaataaaacatgacatgggaaggtgagcaccatctaatctaccttacatatggcaaagtgagagccatgtggtggacctcagatatggcaaggtgagagccatctggccgaacttagtcatggcaagctggtggctaaatccaaggcttgtggctgacaactgtatcaaaaaaaaaaaccaaaagtaagtatatcacaatatcaaacaaataacaacaatcttaaagatgaaataattaagctgaagttaacaataataaaaggtatttaataccacaattgagaactcctatctctctctctctcactgtgtgtgtgtgtgtgtctgtttgtcacaaccagtgtgaactgtgacaaaaaataaaccaaaggtcaacttcagtgtgtaggaaggagcatacaagaatagagagagaaaagaacaatgaaaaattacagcaagttactctaagtatcgtggaaacaaactgaaattgtggttagaaaaaatacagaggaataagttcccagtagtcccaggtacttgtgaggccgagatgggaagacccttgtttaaaagactgttgtataaaactaacctgtctcatgacgttctaaaccaagctcaggttccctgctattgggtgaaccatccaacgcttggtgaattctgtttcacaataggaagatccaacaccaaaggatcaaaaagcgatgtcgctatgaactcttggccactgcaaggcagttatcccttgtccacctcagacatggcaaagcaagagccgtctggtcgacttcaatcatagcagctgagggccatctggtcaaccatctggtatcttctctgacacgtcttgcttaaaacccaaccaaaacgtcaaaaggatcatgaggccctgctttcccggtctgtattcatactgaaaatcaagatcaagcaacttctgcccttctgctccacaggaggttttggtactccctgcactcaccttcagacacctgcattactgtttgacaggtgtaccgcaccagtccgactctgcacttggcactattccaggaccagttaacatccagccagcatgtggccaggtgcttggcgccaaaagtgagccccttttggctttcctccccagccccaacttcaccaggtcagtgaaaaaatgatcagggtagtggaatttcaccggcagcccacaaggccagtggacctcaccccatctcctcagagaaacagaggggtgctggggcctttcacttattctacacctctcatgtctcttcaccataccagactagagtcagtctcaacagagtctttgttccctgctgattctgtcaagcccattcctttggctgtggtttcactggatagcaggtaggaacagtgggaatcttgtccatccattcatatgagtcactaattagatgatgaggcatttggctacacttaagagagacatatttactcctgccatttactcgtgcttcattgaatttcttcattttgacattcagagcactgggtagaattcacgttgtgtcaacacccaccataggccttcaccatgctttgttttaaaaagtcagattcccctggtctgcatcagttctaagaaggctgctaggaagtggcaatagcaaggtgggcagggatagggaagaggaaggtatggcaaggtgggtggaggatgtctgcagaggggtgccgctagcgttgaggggtggagtacagcacctcatccagccactgcctgcacccagccccatttcaagccccagccagactggcaaagcccttagagcaaattcttaccctgaacttactgatccagcttgctgatttcccttacctacattgttctaacatgccagaggctgtttaccttggagacctgctgtggatatggttacagcctggtgtgagatttacaccctctcccccagattttcaagggcctgtgagagctcaccaggtgcctcctgatctatgattctttccaaggcacagacctctctctaagggtgaatccactacagggtgccctgctcttcacaaaaagaactctcccctgggctcccaccagcttctccaggatcacttccattacctccctgaatgcctcatggtgcccatctctgccactccggattcagaaatctgaacttgactccgtttccattggctgagggcaatggaagtcatcatccatcccttcggaatggcactctcctatctctggggaccgagtgacccatcttcaactggaacccttctccacttcggccttcaaagttctcatttgaatatttgctactaccaccaagatctgcacctgggacagctccacccaggctcatgcccaaggcttcaaggctcattgcagcggtcctcccactcatagcagcatagcatcctcggggctccagcgggagcgaccaccctcaccactcccatccactctcaactgctggcaatggccgggtatgggcccaatgtttcagtaccatccatttttcagggcgagttgattctttgttgttaaacactccttagtggattctgacttccatgcccaccgtcctgctgtctatatcaaccaacacattttctggggtctaatgggcatcagcatcaggcaccctaacatggcatttggttcatcccacagcagcagttctgcttaccaaaagttgcccgctaggcactcgcatttcatacctggccccatgccatcgagctgggcttctaacccatttaaagtttgagaattggttgagatcattttgactccaagacccctaatcattcgctttaccaaataactgcgtggcatggggtttttgcgagagcgcccgttatccttaggaaaacttcagagggaaccagctactagatggttggattagtcttttgcccctatacccagatcagatgaccgatttgcacgtcaggaccactacagacccccaccagagtttcctctcgcttcgccctgcccaggcatagtttatcatcttttggtgcctaacacaagcgctcattctccacctgcccagcacagtgggcgagagtggacggtggtgctcccttggcaaactggagaggcctcaggatcccgcctcagccagccagcgcatcagccttcaccttcattgcgccacagtggctttcgtgcgagcccctgactcgcacacgtgttagaccctttggaccatgtttcaagatgggtcatgtgggtagccaacagcgccaccggcctcgtgcacttcttccactgttcttttgaaatgagtgcatggccgaagagtccccccagacccgacagcacaaccagcctggggcacaccacagtcagcccctgcccctcacatgcggcctactcgctgggggcagggaaggggtggtagagtagttacaccgtgggaggggtggcccagccccctagagggacgctgtcatgcccccacgggggatcccctcatggggggctcccactggggtgggagcagggaaggggagagcagggcaacaggtctcactacctcagtcccgggattctgcgagtgctactgctgagggactgtaacactcggggtgtggcccagctcacccccctccagagggatggggaggacatgaccccccgagccaccttccctgccgggcctttccagccgtcccagagccagtcacggcgcagcaccacagtggaaatgcatctggcggtggccagtcgccgtctggaggacagtccccaaggactcccccgcctgcccaacccacccacctccgcacctgctggggcccgccacctccaaggaggaggaggggtggccgaggagggagggcggttggaggggtcgggaggaacgggaggcaggaaagatccgccagaccactggcacagcccgacccgccgcctgtttgaatcttccatcagactgcatggatcccacacatttaagtcttaacggtttcacgccctcttgaactgcgtcttcaaagttcttttcaactttcccttacagtacttgttgactattgtctcttgagccagtatttaaccttagatagagtttgccaccagcttgaggttgcattcccaagcaacccgactctggaaagacccaggcgtggcagccaggggctgctaatggcctcacaccgtccacaggctggctgggcctcaatcagaaggacttgggcccccacaagtggcgttggggagtgagtcttccatacgccacatttcccgcaccctaccaaggggcagggatttggcactgggatcactgttcacctaactttactaagggcatcctggttagttccattttctccgctgactaatatgcttaaattcagcaggttgccacctctagcctgaggtcgcgtcttggaataaaggaagagacgggcgggcatggaggatgcgagcctggacactcggttgggagacaggcccagtgagggaggggggcgggggtgacagagaagagctgcggctgacggcgtccctgccgcaccagagccggatgacgggagggagaagcaagaactaggggcagggaatacacagtaccctcaccgtccagaggactgcgactgaggatgtgcttccacccccccccaatgcggaagctcaagggggccacacgggcggcacagccatgaaccagaggcaagcacacaatggcggatgctgccatggtgtcccatgagtcaccaccagggcaccgccagcacgcagcttggccttgaccccgaccgggggggtcacgcagggcagacttctggccccagaagtgcacagcaggctgggtgggagaggaggagggtgcagggaggagcagcatttggccggacaccaggctgccaccggggcgggcggtaaactgtggtgggcggtgaactgtggcgaccgggatgaaatcttgctttccacccccccaaccttccccaccccccacccgccaatgtaggacagcacaggacattttgcccaggcccaggcgaaccctggaccgcttgcagcacgagggagctctctaggggaacccggactgtggcagccacaggaactcggccccagccggctcttttccttcctctcacaggcagtgggatccctcctaaccaaggctccttcccccaccacgtggtccctcacagggtttgcatggatgaatgggaggtgggaggaaggtgctaatggaaaaggaggggggcaccacaaggcctgtacttgggaggacagaggggccaacgagccctgcaagggaaccgccagccatgcacccctgggaggccagaagcaccccttgggatgattgctcagcaagtgatgactcagacaggtgtagccctgggaggaacacggagtcacaagtgcatttgaaatgatgatcagtgtgtcctgcaactcacattaattctcacagctggctgcattcttcatcaatgcaggagtggagtgatccaccgctaagagtttcacaaagttctttggtgagggactcccaacaccgggaggccctcctggcacagcacatccccgaagggattgcctcaggtcagccaatgagacagcactgagacagaactctcagaggggttggaaggtttcaccacaggggcatgcacaccacccccacaggggtgagcacagacacccaacagttgccagggggttcccacccctgacaacgcagagcccaacatgggcagcacacacaatggcacgatggccaccaggtaagcccccactcagcagctgcaaccatggcaatgacaggagaaaaacaaacaactccattaaaaagtgagcaaaaaacatagacacttcttaaaagaaggcatgcatgtgctcaacaagcatacgaataaaagctcaacatcactgatcattagagaaatgaaaaaaacacaatgagataccatctcataccagtcagaatggatataattaaagggtgaaaaaataaattctggtgaggttgtggagaaaagggaagacttataccctgttggtgggagtgtaaattagttcagccattgtgaaaagcagttaggtgatttttcaaggagctaaaagcagaactaccatttgatagctctgctagccatcccattactgcatatatatccagagaaatgtaaattattttaccatagagacccatgcattcaaatgttcattccagcactatacaatagcaagatatggtcaacctaaatgccatcaatgacagactggataaagaaaatgttgtatatatacaccatttcctctcataatagtgatttgatccaaataaggagtcaaagtccatgaatgagtatgtggaatgaaaagccactctacaagatcttgctcttgaacaataacaccagtaggtgaatgctgagttggaaaaattagcaaatctagagtcttctctggatctattctatttatttgagccttatggacttgctttttgattagctgtaactcgacctcagcctcctttgttaattgctgagggcaagtgagactaggacctcctctaaggatggaaaatagattactcatggcataggtaggaatgtctagagcaagtcgtatccaattaatgtccctagtaatttttgaaagtcattaaatgttttcagttgatccctatgtatggttactttctgtggcacaatggtagtgtcatttactaaggtccccaagtaagagtaaagattagtagtctgaattttgtcaggagctataattaaaccagcatgagaaattgaattttgcaagtaatcataacattggaataatatttcttgagtgggggcaccacaaaatatatcatccatctgatgaataatgtaacactgaaagttttttaccagtaggttcaattgcttgccctacataagtctggcaaattgttgaactgtttaacatgccttgtggcaacactttccagtgaaaatgcctagcaggctgcaggttgtttacaacaggaatcatgaatgcaaaccattcacagtcttgctcagctaaggggatagaaaagaaagtcttttaaatctatgattattaaaggccaatttttccaaatcatagcaggagaaggcaatcctggctgcaattcccccataggttgtataactgaattaatggctcttaagtcaattaacattctccatttacctgattttttcttaattacgaaaactggagaattccaaggggaaaatgttggagctgtgtgtcctttttctaattgttcagtaattaagtcttctaaagtctccagtttctctttactcagcggccattgttctatccaaattggcttatctgttaaccattttaaaggcataggttttggaggcttaacaatggccaccatcaaaaatgatatcctaaaccttggagggaacttttcttcctgcttgaagcagttccttcaaaccttgcaaaattcttctagtcccacaccagggacataccctatttcatgcatcatatgctgactttgagggctatataattgttctggaattagaacttgtgctccccattgttgtaataaatctctcccccacaaatttataggtacagaagttataattggttgaatagtcccagattgtccatcgggcccttcactatgtaaaatatagctactttgatatacctcaagggctttaccaagtccaactatgttaaattgagtgggttgaattggccatgtggacggccagtgctttagagaaatgattgaaatgtcttctcctgtatctgccaaacctttacacttctttccctgaatagttatttcacaggtaggatgtttatcagtaatttgattcacccaataagctgctttgccttgtttatttgtgcttccaaatcctcctgttcatttaatttcacttttccccatttccacatatggcacaatcaggagctgtgttatgtgctctcctggctctgctttccagggaacagaagtagatataacaatttgaatttctccattgtaatctgaatcaatgactcctgtatgtatttgcactccttttaaattgaaactagacctacctagaagcaatcctatcctccccactgtcaagggtccacagactcctgttgggaacttttgcaagggttccccaggcagaaggctcacagcttttgtgcagcataaatctactgcagcactattggctgtggcaggggacagacaaaaattagttgggcacacacgtatagtcccagctactcgggaggctgaggcaggagaatggcatgaacccaggaggcggagcttgcagtgagtggagattgtgccactgcactccagcctgggtgacagagcgagactctgtctcaaaaaaaaaaaaaaaaaaaaaaaaaaacctaggaacaagtataagtaaaaattctttctgatgtgatctttatatgataaacctacacatgtacccttgaaccaaagataagagttaatatgaaataactccatggctggaggagaatgaaatgtaggtggaaagaccggtttgtgctacagatagtgacccaaatgggactgtactctgatttacttctgtgtccatgtaggcagatgagattatgaacaagttacctagaaacctaatctggtggagaagatgggttgctgctgcagatccagtgcttggaggtggggatatgccgggacaattgtagacacttttgtgtagtgtatagtgttttctgttaagaaacgctagaattaaaaacgctgtggtgaagtttctgagggtggtgcctagtcctgagagaggtgtgggcacatcaatgtgtagtgggtatgtttgtgagtgggtgagaatcctgtggtggcagctgtgggaaaagggggtctgtcatcagagcacgtttaagtttttagtcctctcttactctgggagaagacttgaaatcacaggacaatgggcagtgtgactgcctgtgtactagagagtggagactttcattcccagacacccagttttattcccggccaggcctccatggtatctttttttctggcatcaaatttgtagtttgctgaatgccaagcacttctacaccaactcattgtctaacatttgaattctgataccacccagagtcagcacacaccctgattcagggctcagtcccacaacattgtccttagtgcagttgccagtcacaaaccccatgggcccagctatgcctctgagctactgtttaaaaattcaggacttcctagccaggcttggtggtgtgcacctgtaatcccagctattagggaggctgaggcaggagaatcgcttgaactcgggaggtagaagtttcagtgagccaagattgtgccactgcattgcagcctgggtgacagagcaagactgtcccaaaaaacaaacaaacaaacaaacaaacaaacaaaaactaaaaaaaaatcaggactcctataaacgatctaaagttcaataatttgatagagctacccacagaactcagcaaaacactgtagttatgttgaccagtttattataaaagatacaatccaggaaaagtcaaatgaaaaatatgtgcagggcaaagaaaagaggtggcaaaagatgaagcacatagaaaatcctggtaaatagctgtgattaataaaataaaattctccatctattatgtgctccaggaaccatttatgaaaagaaacatccttcccattatgacttagatgctctttttttcacctatcacatagtcagacatagactctgcacatttccttcttgttctcatttaaaaatcagctgaatttttcttcagtggtaaaaataaaatacttctaaataaaatttcacttaagtcaggctgggtgcagtggctaacgcctctaatccaggcactctgggaggctgaggcaggtggatcacctgaggtcaggagttcaagagcagcctggccaacatggcaaaccccatctctactgaaaatacaaaaattagctgggtgtggtggcacatgcctgtaatcccagctacctgagaggctgaggcaggagaattgcttgagcctgagagatggaggttgcagtgagccaagatcacatgaccgcactcctgcctgggtcacagagtgagactccctccccacaaaacaaacaaacaaacagacaaacaaaaaaacttcacttaagtctatcaccttcctacaggctcctgaactttgagctatcctctgcctaaaccaacatacaactccattttaggtctctcctaagaacgtacgacttgagggtaaaacattctctgaaccagaatctgactttttcactctccatttgccattcccctcccaccttctttctaatcttgtttgcttctccctataaaagaaagcacttttctgcctaaactttgcaatctttaaagctttaaggattatagttggtacttcctcctgttgcaatactcttttggaacttaatttttttttacataaatctaactttgttttattttacaaagtctggcaactgtctcaaaacaagaacaaacttatcttcagtaagaccctcccagtccccttctatcgtaaccttaacagcatctgcctatggctccccagctttccagggctctgtagcttctctcactataaagttttcttctatggctggggtgagcaggctgggacacctgcaggggaggctccccagaaaaaactaactgggcctataataaactcattttgcaggctcagtattagccttaacttggagtcactgtgatcaggcttaatttccacatcagttactttcctttttttgtttttgtttttttttgttgttgttgttgtttgtttgtttgttttttaagaaagagtttggctcttgttgcccaggctggagtgcaatgacacagtctcagctcactgcaacctccgcctcctgggttcaagcgattctcctcctgcagcacctcccaattagctggaatttcaggtgcctgccaccacacccagctaatttttgtatttttagtagagacaggatttcaccatgttggtcaggctggtctcaaactcctgacctcaggtaatccgcctgcctcggcctctcaaagtgttgggattattggcatgagccactgtgcccagccactcacttggattttgaaagtaagtgtttcaaaaatccagcaaaattactcaaacacaatgttcacgtaaaaaaaaggaaattttaaggtgcttgtatttcatacctcaacaaggaaagcaaaattatccattcccttcagacaataaatgtattattgtactattttcatgaaaaatcatgtagcaaacaattagtaatataaaaacacttctaggagttaccaagtatttgtttgtttgtttttggagatggagtcttgctctgtcacccaggttggagtgcagtggcacaaacccagctcactacaacctccacctcctcagttcaagcaattctcctgcctcagcctcccaagtagctggcactacagacacatgctgcaatgcccggctaatttttttgtattttagtagagatggggtttcaccatgttgcccaggctggtcttgaactcctgagctcgggcaatctgcccgtgtcagcctccacaggtgctaggatcacagttgtgagccaccgcgcctggcctgaagttttatctcacaaaatttagaataaaactcagaaataaaaatcacaggatacagaacaaaaatattcacatcatgaatttaccctgtaaaaagagaaactgatgttttaatgaatcgatgtgactcactagttatctaccacattttcttgtggaaacctatttatttcctgcagccaaaatagaaggaagatttcccttatttttacccttggtagctagtattctaatagctattccttggaattcttttggaaatcacttagccataaaaaatacacctgacaaaatttctaaactcaccctgggaaagaaaaaggtaaatgagaatttttaggccgggcaccatggctcatacctgcaatcccagcaatctggcaagttgaggcaaatggatcacctgaggtcaggagtttgggaccagcctggcccacatggcaaaaccccatctctaccaaaaattaaaaaattagccaggtgaggccaggtgccgtggctcacacctgtaatcccagcactttaggaggtgggggtgggcagatcacctgaggtcaggagttcaagaccagcctggccaacatggtgaaaccccatctctactaaaaatacgaaaattagctgggcatggtgatgggtacctgtaatcccagctactcagggggctgaaacaggagaatcgcttgatcctgggaggtagagattacagtgagccgagatcaccccactgcactccagcttgggtgacacagcgagacttcatctcaaaaaaaaaaaaaaaaaaaaaaaattaggccgggcgcggtggctcacgcctgtaattccagcacttcgggaagttgacggatggatcacctgaggtcaggagaccagcctggcccacatgtctaaaccctgtctccactaaaaaaacacacaaattagccggcgtggtggtagatgcctgtaatcccagctactccagaggccgaggcaggagaatcgcttgaactcgggaggcggagtttcccgtgagccagatcacgccccggcactccagcctgggaaacagagtaagactccatctctaaaaaagaaaaaaaaagggagaaagagaaagaaataggtaaatgagaattttttttttttttttttgagacggagtctcgctctgtcgcccaggctggagtgcagtggcgggatctcggctcactgcaagctccgcctcccgggttcacgccattctcctgcctcagcctcccaagtagctgggactacaggcgcccgccactacgcctggctaattttttgtatttttagtagagacggggtttcaccattttagccgggatggtctcgatctcctgacctcgtgatctgcccgcctcggcctcccaaagtgctgggattacaggcgtgagccaccgcgcccggccataaatgagaatttttaaccaaagaaatatactattagattcttttgaaactcacctgctttaggcccttgtaaatactttacgtttcaagctctactaataatatgcaatttatagttaaaaaactgatgttaatataagtgaacaaatcttttcaaggtgacaaacccagggagtggcagtgctggttagaaaacagatgtgtctcactcatgagtcaagtcaggccatccaatcacttgagagattctcccaccccaacttgctcactgaagtgctcaatgaccaccctctcaggagacactgcactatgccccagtgagttcccgaagtacgttttacttcgcaaattcttgcacaatctcactggggtcatgtttttattttttgtttttagggatactatttttttcacaaaacttaaagaatccagggtgcagaaattacgtctgttttcccctcaataccagcatcagattggctgaccagcaatgaatcttcaagaaatgcaagctgagttgagtgaagacaatcttttttttttttttttttttttttttttgagatggagttttccctcttgtcacccaggctggagtgcagtagcacaatctcagctcgctgcaacctcagcctcccaggttcaaggaattctctggcatcagcctcccaagtagctgggattacaaatgtgcaccaccacacccagctaatttttgtatttttagtagagacggggtttcaccacattgaccaggctggtctcaaactcctgacctcaggtgatccgcccacttcagcctcccaaagtgctgggattacaggcatgagcaactgcacccggcccgagtgaagacaatcttaagtgtctcagggggttagcttttcaaaggaagagtacaccaggagattcctttcagctccaagcattccgctgactgctcccttgagaggctacaccctgtatctcaggttgtcgtatgggagaaaatgactcaggagctggtattcactagacactctagcagacatagtcatggcaggtatattggtttattcacagacagtagtgaaacctggggtgcctgagaacacatcacccaataaagctcccccccaaaaaactttgacctcaaaacattcttataagatccccaaaacattcttataaggtccctgtgcctagggaagatgaaagaaaaagaggcacagagatttttcttttcttttttcttttattttattttatttttaattttattattattatactttaagttttagggtacatgtacacaacgtgcagatttgttacaaatgtatacctttgccatgttggtgtgctgcacccattaactcatcatttagcattaggtatatctcctaatgctatcccttccccctccccccaccccacaacagtccctggtgtgtgatgttccccttcctgtgtccatgtgttctcattgttcaattcccacctatgagtgagaacatgtggtgtttggttttttgtccttgtgatagtttgctgagaatgatggttttcagcttcatccatgtccctacaaaggacatgaactcatcattttttatggctgcatagtattccatggtgtatatgtgccacattttcttactccagtctatcattgttggacatttgggttggttccaagtctttgctattgtgaataatgccacaataaacatacgtgtgcatgtgtctttatagtagcatgatttataatcctttgggtgtatacccagtaatgggatggctgggtcaaatggtatttctagttctagatccctgaggaattgccacactgacttccacaatggttgaactagtttacagtcccaccaacagtgtaaaagtgttcctatttctccacatcctctccagcacctgttgtttcctgactttttaatgattgccattctaactggtgtgagatggtatctcactgtggttttgatttgcatttctctgatagccagtgatgatgagcattttttcatgtgtcttttggctggataaatgtcttcatttgagaagtgtctgttcatatgctttgcccactttgtgatggggttgtttgtttctttcctgtaaatttgtttgcgttcattgtagattctggatattagccctttgtcagatgagtagatcgcaaaaattttctcccattctgtaggttgcctgttcactctgatggtagtttcttttgctgtgcagaagctctttagtttaattagatcccatttgtcaattttggcttttgttgccattgcttttggtgttttagacatgaagtccttgcccatgcctatgtcctgaatggtattgcctttattttcttctagggtttttatggttttaggtctaacgtttaagtttttaatccatgttgaattgatttttgtataaggtgtaaggaagggatccagtttcagctttctacatatggctagccagttttcccagcaccatttattaaatagggaatcctttccccattgcttgtttttgacaggtttgtcaaagatcagatagttatggatatgcggcattatttctgagggctctgttctgttcaatcggtctgtatcctgttttggtactagtaccatgctgttttggttactgtagccttgtagtatagtttgaagtcaggtaacgtgattcctccagctgtgttcttttggcttaggattgacttggcaatgagggctcttttttggttccatatgaactttaaagtagttttttccaattctgtgaagaaagttattggtagcttgatgaggatggcattgagtctataaattacctttggcagtatggccattttcacaatattgattcttcctacccatgagcatggaatgttcttccatttctttgtatcctcttttatttcattgagcagtggtttgtagttctccttgaagaggtgcttcacatcccttgtaagttggattcctaggtattttattctctttgaagcaattatgaatgggagttcactcatgatttggctctctgtctgttattggtgtataagaatgcttgtgatttttgcatattgattttgtatcctgagactttgctgaagttgcttatcagcttaaggagattttgggctgagacaatggggttttctagatatacaatcatgtcatctgcaaacagagacaatttgacttcctcttttcctaattgaatactctttatttccttctcctgcctgattgccctggccagaacttccaacactatgttgaataggggtgttgagagagtgcatccctgtcttgtgccagttttcaaagggaatgcttccagtttttgcccgttcagtatgatattggctttgggtttgtcatagatagctctcattattttgagatatgtcccatcaatacctaatttattgagagtttttagcatgaagtgttgttgaattttgtcaaaggccttttctgcatctattgagataatcatgtggtttttgtctttggttctgtttatatgctggattatgtttattgattttcatatgttgaaccagccttgcatcccaaagatgaagcccacttgatcatggtggataagctttttgatgtgctgctgaatttggtttgccagcattttattgaggatttttgcatcaatgttcatgaaggatatgggtctaaaattctctttttttgttgcgtctctgccaggctttggtatcaggatggggctggcctcataaaatgagttagggaggattccctctttttctattgattggaatagtttcagaaggaatggtaccagctccttctcgaacctctggtagaattcggctgtggatccatctggtcctggactttttttggctggtaagctattgattattacctcaatttcagagcctgttattggtctattcagagattcaacttcttcctggtttagtcttgggaggatgtatgtgtcgaggaatttatccatttcttctagattttctagtttatttgtgtagaggtgtttatagtattctctgatggtagttagtatttctatgggattagtggatatcccctttaccactttttattgcgtctatttgattcttctctcttttcttctttattagtcttgctagtggtctatcagttttgttgatcttttcagaaaaccagctcctggattcactgattttttgaagggttttttgtgtctctatttccttcagttctgctctgatcttagttatttcttgctttctgctagcttttgaatgtgtttgctcttgcttctctagttcttttaattatgttgtgagggtgtcaattttagatctttcttgctttctcttgtgagcatttagtgctataaatttccctctacacactgctttgaaggtgtcccggagattctgatatgttgtgtctttgttctcattggtttcaaagaacatctttatttctgccttcatttcgttatttactgagtagtaattcaggagcagtttgttcagtttccatgtagttgagtggttttgagtaagtttcttactcctgagttctagtttgattgcacttggtctgagagacagtttgttataatttctgttcttttacatttgctgaagcgtgctttacttccaactatgtggtcaattttggaataggtgtgatgtggtgctgaaaagaatgtatattctgttgatttgtggtggagagttctgtagatgtctattaggtccacttggtgcagagctgagttcaattcctggatatccttgttaactttctgtctcattgatctgtctaatgttgacagtggggtgttaaaatctcccattattattgtgtgggagtctaagtctctttgtagatcactcaggacttgctttatgaatctgggtgctcctgtattgggtgcatagatatttagggcagttagctcttcttgttgaattgatccctttgccattatgtaatggccttctttgtctcttttgatctttgttggtttaaagtctgttttatcagagactaggattgcaacccctgcctttttttgttttccatttgcttggtagatcttcctccatccctttattttgagcctatgtgtgtctctgcacgtgagataggttttctgaatacagcacactgatgggtcttgactctttatccaatttgccagtctatgtcttttaattggagcatttagtccatttacatttagggttaatattgttgtgtgtgaatttgatcctgtcattatgatgttagctggttattttgctcattagttgatgtagtttcttcctagccttgatggtctttacaatttggcatgtttttgcagtggctggtaccagttttccctttccatgtttagtgcttccttcaggaacccttttagagcaggcctggtggcgacaaaatctctcagcatttgcttgtctgtaaagtgttttatttctccttcacttatgaagcttagtttggctggatatgaaattttgggttgaaaattcttttctttaagaatgttgaatattggccaccactctcttctggcttgtagagtttctgccgaaagatcagctgttagtctgatgggcttccctttgtgggtaacctgagctttctctctggctgcccttaaaattttttccttcatttcaactttctggaggagtatctttgtggcgttctctgtatttcctgaatttgaatgttggcctgccttgcttgattggggaagttctcctggataatatcctgcagagtgttttccaacttggttccattctccccgtcactttcaggtacaccaatcagatgtagatttggtcttttcacatagtcccatatttcttggaggctttgtttttttctttttattcttttgtctctaaacttctcttctcacttcatttcattcatttcatcttgcatcactgatatcctttcttccagttgattgcattggctactgaggcttctgcattcatcatgtagttctcatgccttggttttcagctccatcacatcctttaaggacttctctgcattggttattctagttagccatttgcctaattattttttcaaggtttttaacttctttgccattcgttcggacttccacctttagctcagagtagtttgatcgtctgaagccttcttctctcaactcatcaaagtcattctctgtccagcttcgttccattgctggtgaggagttgtgttccttttgaggaggagaggtgctctgatttttagagtttccagtttttctgctctgatttttccccatctttgtggttttgtctacctttggtctttgatgatggtgaggtacagatgggtttttggtgtggatgtcctttctgtttgttagttttccttctaacagtcaggaccctcagctgcaggtccattggagtttgctggaggtccactccagaccctgtttgcctgggtatcagcagcggtggctgcagagcagcggatattggtgaactgcaaatgctgctgcctgatcaatcctctggaagttttgtctcagaggagtatcggctgtgtgaggtgtcaatccgcccctactggggggtgcctcccagtaggctactcgggggtcagggacccacttgaggaggcagtctgcccgttctcagatctcaagctgcctgctgggagaaccactactgtcttcaaagctgtcagacagggacaattaagtctgcagaggttactgctgtcttttgtttgtctgtgccctgcccccagaggtggagcctacagaggcaggcaggcctccttgagctgtggtgggctccacccagtttgagcttcctggctgctttgtttacctactcacgcctcggcaatggcaggctcctctcccccagcctcgcagccaccttgcagtttgatctcagactgctgtgctagcaatgagtgagattccgtgggcgtaggaccctctgagccatgtgtgggatataatctcctggtgtgccgtttgttaagaccattggaaaagcacaatattagggtgggagtgacccgattttccaggtgccatctgtcatccctttctttgactaggaaagggaattccctgaccccttgcacttcccaggtgaggcgatgacttgccctgcttcagctcacgcacggtgcaccgcacccactgtcctgcacctactgtccggcactccccagtgagatgaacccggtacctcagttagaaatgcagaaatcacccgtcttctgtgtcactcacactgggagctgtagactggagctgttcctatttgaccatcttggctccgggacctttttttttttacaatacagtatcagggtattatgctttggtttattctcacaggagatatttacaaacagaaacaaatctctttaaatgtgctatacaatgctttgtcaaaaaaggattaattaaaatatggtatcaaaaatgtacactaaaggacaaatagttaataatgtgaattagggagaggaagttgacatttggaattttcagaagaagctgttaattgagtatattattgcaagccagagttaggctggaggaatggggagaaaggggtagacttgagaagctgcttgggacacctgtggaaaatgcaggaaaatatcagtcccctgtggagtctgaaaatatttaagtggcaggcaattccactgaggtagctctaatccttgaattcctacttttaaaaagtctaactgaaatcctttttttggtaaattactacctcaagggaaaaaaaaatttaggcttaaccaactgcaaactgtcaattaagctctgactacataaccaggaaatttttacactcaaggtaaaaagtaagaaactatgtaactgtaactaacagattattgagtttaagtttttgcatcatgcaccttaaaaaaagtctttctggctgggtgtggtggcttactcctgtaatcccagcaccttgggaggccaaggtgggtggatctcttgaggtcaggaaaaaaaaaatctttccttcacgctcctcccattgaccacaaactacaatatttgaacaacactttcatttaattatttaatatttttgcagtgactcccataaatttttctttttactctttgagacggagtcttgctctgtcactcaggctggagtgcagtggcacgatcttggctcactgaaaactttgcctcccaggttcaagccattctcctgcctcagcctccagagtagctgggattacaggtgcccacaaccacatctggctaatttttttatttttggtagagacgggcttttaccatgttggccagggtggtctcaaactcctggtctcaaatgatctgcctgctttggcctcccaaagtgctgggattacaggcataagccactgcgcctggcagacgccagtaatttttattttatttttttctgagtcggagccttgttctgtcacctaggctggagtgcagtggcaggatcttggtttgctgcaaccttcaccttctgggttaaagtgattctcctgcctcagtctcctgagtagctgggattacaggtgcctgcctccacaccctggtaatttttttgtatttttactagagatggtgtttcaccatgttagccaggctggtctggaacccctgacctcaagtgatccaccctgatcaccttggcctcctgaagtgctaggattacaggtgtgagccaccacgcccggctcccaaaatattattattttaatatgtaagcaatatttattaataaagtatatatacttagaactaaatttttgaaaccaaccctgtattttacctttttagcacattgcagttcaaagcaggaacatttcaggcacctagtagccacacatggccaatagctgccacattgaagtacagcttcaatgtcagtggaggtgaagggcttgaacatcccttttctgccacaggggaggtctctacctaccaacaacttcttcagttaaaaaggtgaaacagataatggccatagaaagggcagaaggtaggaagagtaaaataaccacaggtggaccactgctggccacctgttgtccacctttcttccagtgaacaaaaaattctcagccaaaggagaagaaaactctgtgttttcagatctgtccatagtcttgatgtccaatgtttagatatgtagaaaataggttaaggcaaacttattttgctatttggccttggccctaattgtcaggctgcggttatctgttttctcctatggtgtgggtgactatgtgagtataaggaccaattacatgcatacatgtctgcatgtattttttaattactcaacgtcattttgcaagacattcaactttaaattaggggaaaaaatcaatacttttagggtgcacactgttagaaggtaactaataaccaatctgtcattgaatcctggcatcctatctgcactgagtgcatgtattagttagctaccgcagcataacaaaccatccaaaactttttagctcataattgagacggtcagccatttaggctgggctcagtgggaccattcttttggtctcagctgagctccttcagacatgtatcatcagctgcttattgactaggcagctgtgcttctgaaggtgagcatctgcttctggggctatcaacaggggcaccttgcttctcttcctcatgttatcttatcctccatctggctaacatgggcgttactcatggagatggcacattctgaaagaaaaacaggagcatttgaaatcttttgagcctaagccccaaactagcccactgtcatagtcacagatttccattgccctgagcaaataaggccagccagatatatggtttggaaaccagattctgtacttcaatgggaagagctgtaaaagcattggcaaatgaatataaaagagataaaaagcaccaggtgcggtggccaggcctataatcccagtattttgggagactggggcagggggacagattacctgaggtcaggagttcgagagcagcctaaccaacatagagaaatcccgtctctactaaaaatacaaacttagctgggcatggtggtgcatgcctgtaatcccagctactcaggaagctcaggcaggagaatcacttgaaccttggaggcagaggttgcagtgagccaagattgcaccattgcactccagcctgggcaaaaagagcaagactccatctcaaaaaaataaaataaaataaaataaaaaattgcagccagacacggtggctcacacctgcaatcccagcactttgggaggccgaggtgggtggattactagaggttaggagttcaagatcagcctgaccaacatggtaaaaccccgtctctgctaaaaatgcaaaaattggctgggtgtggtggtagctgcctgtaatcccagctactcaggaggctgaggcaggagaatcacttgaacccagaaggtagaggttgcagtgagccaagatcatgcctctgcactccagcctgggcaacaagagtgaaactaagtctcaaaataaaaaattgctgcaatttttgaaatcactttcattctgccttttgcctatgtggtttatacaactatttcacctcaagaaacttgttcagccaggcgcaggggctcacgcctgtaatcccagcactttgggaggctgaggtgggcagatcacaaggtcagaagacccagaccagcctggccaatatagtgaaaccccgtctctactaaaaatacagcaaaattagccaggcatggtggcccatgcctgtaatcccagctactcgagaggctgaggcaggagaattgcctgaacccaggaggcagaggttgcagtaagctgagttcacgccactgcactccagcctggatgacagagcgagactctggatttaaaaataaaacaaaacaacaacaacaaaaaacagccgggtgtggtggctcatgaggtgggtgaatcatgaggtcaagagatcgagaccatccaggccaacatggtgaaatgccatctctactaaaaatacaaaaattagctgggcatggtggcatgtgcctgtagtcccagctactcaggaggctgaggcaggagaattgcttgaacctggaagacagatgttgcagtgacctgatatcacaccactgcactctggcccgagtgacagagcaagactctgtcaccaaaaaaaaaaaaaaaaaaaaattgaccgggcacagtggctcatgcctgtaatcctagcactttgggagaccaaggcaggcagaatgtcagagctcaggagttcaagacaaccttgggcaacacagggaaaccctgtccctactaaaatagaaaaaattagctgggcatggtggtgcatgcctgtagtctcagctactagggaggctgaggcaggagacttgcttgatcccaggagacggaggcttgaacccaggaggcagaggttcagtgagccgagatcacaccactgtactccagcctgggagacagagtgagactctgcctcaaaaaaaaaaaaaaaaaaatgcagaaacattttgaaaggacaaaataatttgggaaaataggtgagggatgagtttagaaaattaaaacccaaaaacacattattcattttaacgatagaaaaaatttgaggaaattttttttttttttaaataaagtctcactctgtagcccaggctgaagtgcagtggtgcaatcttggcccactgcaacctccacctcccgggttcaagcgattcttctgcctcagcctccagaatagctgggattacaggtgcacgccaccacgtcctgctaatttttgtatttttagtagagacagggtttcaccatattggccaggccagtcttgaactcctgacctcatcatccacccgcctcgtcctcacatagtgctgggattacaggcatgagccaccatgcccggcctggaaaaatttttaaataaaaaaaaaactttagagaaattaaattcaacagagtttaactgaacaaagagtgatttgcaaatagagtagcatgtgaatccagagtaggctcagagagatttcagcatagccacgtggtggacaaagacttatggacagacaaagcaaagtgacatacagaaaatggaagtgaggtacagaaacagccaaattcattacaacttgaggtttgccttatttgaacatggtttgaacagttgacatccttttattgaccaaaccacagtggttggtacaagaatgggtacagtctatttacatatccagttaggtttcagttcattgtgtaaaataaacgaacaaacaaacaaaaactattgactaaaattaaacgggaaaaggggcagctttagggtataattaatttaacaatttctccctagggtcatagaccaaaacttttttttttttttttttgagacagagttttgctctgtcaccaggctggagtgcagcggcgctatctcagctcactgcaacctccacctcacaggttcaagcaattctcctgcctcagacacccaagtagctgggactatacaggtgtgcccagctaatttttgtatttttagtagagatggggtttcaccgtgctgcccaggctggtctcaaactcctgacctcaagtgatctgcttccttcggcctcccaatgtagtgggattacaggcatgagccaccacacccggctgagatagaccaaaatttagacattgatatcactgtgtcatcataaaaaatgaacttatttagtctcagatctcactgtgaaatatcagaactgtgggttttataaagtggaaacaagaacttcaggttattattttattattattatttttaaaggattagactacaggggatctctttgtgttgaaatctgctatttatagaagaaaacaaaaacttgtttgtattttctcgtgtttttttgagatggagttcctcactcttgttgcccaggctggagtttagtggcgtgatctcctctcactgcaacctctgcctcccaggttaaagcaattctcctgcctcagcctcaggagtagctgggattagaggcatgtgtcaccatgcccaactaattctgtattttgttttttctttttttctttcttttttttttttttttgagacaaagtttcactcttgttgcccaggttggagtgcaatggcatgatctcggcccactgcaacctccacctcccaggttcaagtgattctcctgcctcagcctcccgagtagctgggattacaggcgctcgccaccacgcccagctaatttttgtattttcagtagagatggagtttctccaagttggtcaggctggtctcaaactcccaacctcaggtgatccacccacctcagcctcccaaagtgctgggattacaggcgtgagccactgcacccggccttaattctgtatttttagtagagacagggatttctccatgttggtcagactggtctcagactcctgacctcaggtgatccgctcgcctcggcctcccaaagaaaaactggtctgttttaagatctacctattttcttaaattttaggtttgataagctcacttttagcatgagtgactcattttgttttgttttggtctgtttgagatgagtgcacatgctcagtccacatgatggccataaataattttgtttaaaaaattcaccccaggccgggcgcagtggctcaggtctgtaatcacagcactttgggaggccgaggctggcagatcaaaagctcaggagatcaagaccagcctggccaatatggtgaaaccccgtctctagtaaaaatatgaaaattagccaggcatggtggcacgcacctgtagtcccagctactcgggaggctgaggcagaagactctcttgaacctgggaggcggaggttgcagtgagcccagatcatgccactgcactccagtctgggcaatgcagcgagactccatctcaaaaaaaaaaaagaaagaaaaaaaaatcaccccatttgtttaagttcttacataggtcatggtgtgaccaaaactcagggccttagtgccactctgtttccattattttttttattttttatttttttataggtggaatcttgctttgttgtccaggctggagtgcagtggcactatctcagctcactgctacctccgcctcccgggttcaagcaattctcctgcttcagccttccgagtagctgggactacaggcccgtgccaccatgcgtggctaattttttgtatttttagtacagacaggttctcgccgtgttacccaggatggtctccatctcctgacctcatgatccacccaccttggcctcccaaagtgctgggattacaggcctgagccaccgcgccaggccaatttttgtattttcagtagagatggggtttcactatgttggccaggcttgtctcaaactcctgacctcatgatccacccacctcagtttcccaaagtgctgaggttacaggcgttagccaccgcgcctggcctattttgggtttttgtccttatcatgtcattcataggttatggtgtcttcatagtcacatacgtctttgagtttctgtcattctgttttacaagagaccatttgacattctagaaatgactgcatgcaaacatttataacttttgagagaatacagtgaagtagggagatattactattttaactatcaggaagatgataccaagagttcgaaacatgctttttagccagggtccccatgaacaaccaactaaaattaaataggtcaaatagttagctagataagtggtctactcatttcaaccaagcacactgttcattaatcctctacaactgcatctctgtggatgcagagtaggctcagggagcctaatggatgtatttctccaggtgcaactatcagtgttagcaagttcacaggtacttctctgttcatccaataagtaattaaaagaaataatattatttagcacaacttcagcaagtacatttaaaatctattgtgtaatcatagcctttacagtataatcttctatagggccctattaggggggatgcatttctaaccattgcctcatttactctacgccatggaaagaaagacctaacaaatgatggccattcagaaaagtaagggcatcctggcaatgctgcttaacttattgtgaaaaagttgtccttaacttatgaagtaagttaagagcagtggaccaatattctgtttctgatattgtgagggaacaaatatcccttaaaaatttctcacccacactggcccttcatcttttatctatcaaggtgtaagttttttcacacataatgttggctacaaaattctctacatttgagtataccccataagtgcacacaagagacccctttctttatttctattgtttgtagagccataaaaaactgtgaaataagtgtgtcatgatagcagagaagtatgatcttgttctgagtgagtgtgtctcaccatgaaacaagcaaaaaaaatactgctgttattttgagacagtgagttagcattttgtccaaatatgtactatgtaattttttattgatatgtaacatgcatagagaaatacatgcacaaattcttcattcaagtaaagctcagtgaattatgaagaatacacttgtgtaatcagataataaaactaggctggacgcagtggctcatgtctgtaattcagtacattgggaagccaatgcgggaggattgcttgagctcaggagttcaagaccagcctacccaacatggcaaggctctgtctctattttgaaaaaataccaaaaaaaaaaaaaaaaaagatccaggcaggctggttgcatgcctgttgtcccagctactggggaggctgaggtgggaggatcacttaagactaaaagtttgaagctgcagtaacccagcattcagccactggactccagcttgggtgacagagtgagacctgtatgtgtaaacacacacacacacacacacacacacacacacacacgtgcacatggtgggggatgtgaaaaagagaaagtgtggctcctgcaattcagtgagacctggttctccatcttgggaactgcccatccacactgaaaccacaacctagcacatgccaattagcacactaaacctgctgagataccaccgtttacccttaaaaaaaattgaagtatttcacctaaaagaagggaaaaagaaaatgatttcacatctaaagcctttgtttcctttataaaacaactgccccttgtcattcgagttgtccagaggtgtctgacaacactaacacacttatggaatcagccaggaaaaatgggcctctcaggtgacaaacaggcacaatggtaactaaaggcaatccattctcatctctacatgatgcccccaactcatgaagtggtgttaactgtgtgaaccatactcatcagaggaaagtatgttcagggcaacacaatcatgaggctgcaaatcaaactgggggcgggaagcacgtaggaggtttccatggccaagacactggtggctatccttgggtgtcatttaaaaatttcaggtgaaaaatccttttcttccagttggctcaggaaaactaacagacattactattggaattcattttactttttagaatttctaagacataaatcatgcttcaaacactccaaaagacattcagctatacctgaggctgaggacctgcctcctcctccatgttagggccctgacagcaggcaaagagaaggagcacaggggccgggtgtggtggctcatggctgtaatctcagcactttgggaggctgaagcaggcatatcacctgaggtcaggagtttgagacgagcctggtcaacaaggcgaaaccccttctctactaaaaacacaaaaattagccatgtgtggtggtgagcacctgtaatcccagctacttgggaggctgaggcaggagaatcatttgaacccaggaagtagaagttgcagtgagctgaaatcgtgccattgcactccagccagggcaacaagaatgaaactgccatctgaaaaacaaaacaaaacaaacaacaacaacaatagcaacaacaaaaacagagaaggagcacaggcaggtggggacagagaacagcccgggtctatagggatccccaaccacccccagagccggtgtctgtaggagggactgtgtggcaagaatcaggtagggagctgggcttcatggagaggttaccaccacttctgcacctttaacttttatgattccactgtggttctccccaggtctcccacccatcctaccctcactccctcattgtgtgttaggcaggtctggttaaaatggggagaataatacattcagattgtagccttcaaggtattcccatctggggtacagggagtagagaggcaagtcaaagtctatggtggtgcttacttctgggcctgagggcaggaaggccagggctgggcacatggatatctggggaaacaccactgctaattccttctccccacccggagctacaatgaggccaggacaatcacaattaataaaaccactgcagctcacatcctgcataaaactaaagtgtatcccaacccccagtcctaccacagatcttcaacttcctatcccagaacacaggaagccctccatctttttgacctaaagcctggactttaagccaggttgggcctgggggtagtggcagcaaaagcagcagccacagtgtcaaatataccaatgacttgagaaatctcatctgcacgtcattcactcagaacagacctggagttgtatacaagttaagaagggcagatctatatactcatgggcatggacacattccacacttgctggggagaatgagaggcacctgtttcccagctgcaggctgatgtccacatacaccattcacgtgtttacatttaggcctctgtattgtgtattcagtgagccagtgcaaatacatatttggggggcaccatttagtgcaacaccactccccacttgttctgggggacagtcaggagggatctggtcagctcctaattccctaggacaaaggtgcctccccctttccagcactcatatccagcagcgccatctcaggaatttttttttttaaacatgaacagcatgaggaagcaggcatggtacgacaggctcagccccagcccagatagcattcacatcttcctggatgggggttgatgcccatcactcacctgctctttagcaccgccttgtgttggttactcagggcctggggagaggtgggggggattgtagatccatggtgggaaccatctcacacccagagttcacctggccacaggccagcaagcaagtccaagtgcacagctctcgaccctgagcctcggcacctccggctgcaatttctatttatatatcaggattttaaaaaccaaaaataaacaaacaaacacaaaaacagccactttgattgaggagaaagtgggagcctaaagcagctgaccctcaaacatctccgccaagccccaggccaggccatctgaacactccaaggccacatgatagttacagaggatgacagtttccacaggtacttgtcaagcactgggctagcttctcacagagtctcagaatgcctcctcgccaataccctgtgaggggaggcctttcctcactagggcacaagaggttcctaagctcttcccaggaaatggttaacaaagtgtggagctaggggaaagcccagtcagaacaagtgactagccagggtcttcctagactccatcccttcctccacatggggcccagaggtgttgcgagcagcctcctgaccccctccatcccactctctcctcaatcaaaatggctgtttttgtgtttactcgtttatttatgggattttaaaaacctgattttttttttttttttgagacagagttttgctcttgttacccaggctggagtgcagtggcaccatctcagttcactgcaacctctgtctcctgagctcaagcaattctcctgcctcagcctcctgaatagctgggattataggcatgtgccaccatgcccagccaattttgtatttttagtagagaaggagtttctccatgttggccaggctggcctcgaactcccgacctcaggtgatctgcccgcctcggcctcccaaagtgctgagattgcaggcatgagccaccgcttctggccaaaaaaaaacccctgatattttatttatagtactttcaggcttgtatgtatgtatttgtataggctttattggaaggaagagggcttaagacagtaacatttttaaaaggtctcagtggggaatagacttccatggcacaaatgatgatgttgacctccttctgttgcctttgggcaaagtataaatagtgtgagaattggcatgtgctgggttgtggtttcagtgtgggagggcagttccttaagatggaaactgagctgtaggagccacactcaccttttatcacattccccaccatggtctttcacttttcttctgtgcttgaatttctttcaacatacatattattttgagtatatatatatatatatatatatatatatatatatatagacacacacacatatatatgtgtgtctgtgggtgtatgtatatatatgtttgtgtgtgtgtgtacacatacaggtctcactctgtcacccaggctggagtgcagtggccgaatgatgggtcacttcagcctcaatctccagtgatccttccacctcagcctctcaagtagctgggactgtaggcatgcaacatcacacaaggccaatttttaaaattattctagaaactgagcctcactatgctgcccagactggtcttgagctcctgggcttaagcaatcattccaccatggctttccaaagtgtttggattacaggtgtttgccatcaaacccagccaaaaacatttttaaaagaaccattacaaccgaattatgagctatggttgtaccactgcactccagcctgggcaccagagtgagaccttgtctccaaaaacaaagcaaaacaaaaaaaacttatgaccaaattaaatttctgaggttgtgtcatctgtgtcccctttctgccctgtaagctatcattgttaaatataatggctattgagaaaactgttagatattaagaaattcctatatatcctctaagtgagaataaggtattctgatgtggcccaatatttcctaacctctacctccagggtctaaactagcaaatcaaatcaggacaaccgacaaaggactgttggccattttcaaatggaagatgaaataccctgttagtgagagtaatccagtaattttaaaaaagagaagtcagactgagatgcagtgcagtcagggcatgattaccctggaatagccacttcacacggaacgatagaggagcctgtctaagatgaacaaatttgggtaacataattcttgcttaaccattctcagcctctgctgcccccgaccccagccccattccaaatggacatcccacgatatggtcagcagtgtggtacagcatggttagaaaggggctcagggatgggatgaagatctttcctgcattatcaaaatgattgaaaagttgttaaaaaaaaatgtccaaatgggcgggtcgcggtggctcacgcctgtaatctcagcactttgggaggctctggcgggcggtcaggagttcagaccagtgtggcgtcaggagttcgagaccagcctgggcaacatggtgaaaccctgtctctactaaaaatacaaaagtagtcgggcgtggtggcatacgcctgtaatcccagctacttgggaagttgaggcaggagaatcatttgaacccgggaggcggaggttgcagtaagccaagatcgcaccattgcactccagcctgggcaataagagtgaaactcggtctcaaaaaaaaaaaaaatccaaatgatcttttcttacccttaagtagcaaataagatgcattatacaagcagacccaggtaagggaaagagcaagtgcatttcaagtctcagctcacttcttaattagctgtaattccctgtgcattttaccctacctactttagcctgtttttctgttcataaaacgcactaatgctgaacggggcgggggcagggggtgggggtgggagtggtatggggagagtgccggtccttatccaatccttggcgctggagcggcaaccgcccaatcaagcgcgcagttgaagaggagtgcatggtttccggcatttggctgggcctttgtctctcgctcccaccagagcttggaatccgtctctgctcttctgcattctccacctcgggagcccctggggactctgtgacggcctctgttgccctgtgatctgcaggtccggagagacgcacagctaagatgtcaggacatcctggaagctgggaaagggtgagtgtgcggggttgggcatcccgaaaggagagagcgggctgtgaaaccggcgggactgccttcgtcaccgctcccgggtttccgacctgaggtccctgctggcgcagttcagccccaggcccctctggccgcaagatggcggctgggcccgcagccgggatccccgcgttcagccccgtccctgcggcgcccagtctggagctccctgggcagctctgcatgcagccccgagtatttcccagattgttcagggatgccaggcggatcatcagggcggaatcctgacttggtgtgtgcgtggcaggagctgcggcaggtggggctcccgagtctcttttcttaaacattttgtttgtttgagacggagtcttgccctgtcgcccaggctggagtgcagtggcacgatcactgcaaccttcgcctcctagactcaagcgattctcgtgcctcagccctccgaaaagctgggattacatacctgcgccaccacgcctggctagttttgtatttctagtagagaagtggttttgccatggtggaagctggtctggaactcaagtgatccgcccgcctcggcctgaccgggaaatagaagcctgaactcagtgactcaagctaaggatagtttagttctgccggcggagcctctcctgcagatgtcccagcctgctcacaatagccatggacagaacctttatgcttagagaagctgcagagccctgaaaatctatacatccacaggcagatgcagttggggttggcacaaaaatggggttgggaggctttttctgggaatagagttattgttctgaggttgtttctagattttgtgatatatgacaaatttagatttaggtaagtgggttttttttttttttttttttttcttttgtgccagagtctcattctgtcacccaggctgtagtacagtggcacgatctcggcacactgcaacctctgtctcccagattcaagcgatcctccaggctccctagtacctgggactacaagcaggcgacccgacgcccagctaatttttgcggggtttcaccattttggccaggctgttctccaactctggacaagaggtaatccacccacctcggccttccaaagtgctggaattacaggtgtgagccactgtgcctggcaagaagttacttttttttttttttttgagacggagttgccctcagtcgcccaggctggagtgcagtggtgcgatcttggctcactgcagcctccgcctcccgggttcaagcgattctcttgcctcagcctcccgagtagctgggattacaggcacctgccgtcatgcgcagcatgaagttacttaattttaaaggagtattgcagcaaggggaaagcaccagctataagatattggagaattttaaaggttagagagaaaaggactttctttcataagaagaaaagaaggtcagaaaaaaagtgggaaggggagggagggatagaacatggtgaaagcagatgctagattagggaatattttacccagaagtcagcctggtttttttgttgttgtttgttttttgtgagatggagtctcgctctgttgcctaggcaggcgggcactggcgtgatctccgctcactgcagcctccgcctcccaggttggaacaattctcccacctcagcctctcaggtagctgggattacaggcgcaccaccatgcctggctaatgttttgtatttttagtataggcggggtttcaccatgttggccaggctggtccaaaactcctgacctcaggtgatccaccctcctcagcctcccaaagtgctgggattataggcatgagccaccacacccggccaagtcagcctgtttttgaggaacataggccgagtgcggtatttttaatataaaaatacaaaaaattagccgggcttggtggcacgctgtattcccagctattcgggaagctgaggcaggagaataacttgaatctgggaggtggaggttgcagtgagccgagattgcaccactgcactctagcctggtgacagagcgagactcggtctcaaagaaaaaagaggaacataaagaggggttgtggttgggtcaaaatttgggagcctgaggaaagaaagaaacctaagcaaagtttgattaacaggtattttgttctaactactgaagacgaatgtattaattgtttataaggcaaaaaaatagcaatttagacagtctgtggcttcataatatcaaaaataggaagggtgtttctttgcaataagatgctcttgaaaacacaaaagttcaggaatttctttaatcactgctcttacctgcccacttcatcttccaccatgagttttccttgccctgtatgtttcttacatttagcttttcctgacttgtgtgttttataacaaactggtaaatgcaagtataatgcttttgttttgttttgttttgttttgtttttttgagatggaggctcactctgtcgcccaggctggagtgcagtggcgcgatcttggctcactgcgagctccgcctcctgggttcacacctttctcctgcctcagcctctccgagtagctgggactataggcgcctgccaccatgctcggctaaattttttttttttgtatttttagtagagacgcggtttcaccgtggtcttgatctcctgatcttgtgatccacccgcctcggcctcccaaagtgctgggattacaagtgtgagccaccgcgcctggctgcaactataatgttttgctaagttctgtgagtagctgtatcattatttaacttgagaagattatgagagcccccagtttataggaactggctcagaagtatagatgagaccctaggaattgtgactgggatctgcagtggtggcagtgttgtgggactgagccctgaacttgtagggtctatgctgactcaaggaggtatcagaattgagttattggacaaccagttggtgttggagaattggttgctgttcagcaaactccacacatttgttgtcagaaaaagaatatcacagatatttgagctggagggagactcttggtttctctgggaaggggaactctgttctgcacacaggctgtcacaatgcacattgtcctgtgattccagatctcttcccagggtgaaaggggactgagggcttggaagaaagaagttctgaaaacagactccctgccctcaacctgctaccaccaatgatttccgcctactaatgaacatacccactaggaatgggtgtggccagaatcttcacaaaacaagaagacttgatctgaggaattactctatagtggctttacctctaaaatttctcaccaaagaattacacaagtgcctagaggactcctggattatccctaccacaaaccctgaacctgaagcagcaacctggtctctctatcaccctgggcttgtggactaccaatcataatctcatccacctgcatggacacaggaatatgtcagaacataaccctgcctgaatcagtatctgtagcataaaccagtctttccagctaccatgcactgtcccccactcacgggtccttgatagcacctttccctcttctgtcttttgcttttctacaaaccctttctgatgtgcacagtgtgcctcaggtgcctgaatccagcacctactgggagtcagatgtccatgagttcaagattatagccctagacctggctgtcataagaacagacaaaaattagaaatacagtcttcatccttgaaaataaaagatttttctctttccttttcttaaagcatttactttagaaaacttttgtatttatttatttttatgttttttttgagactgagtcttgctctgtcacccaggctggagtgcagtggcacaatctcggcttactgcaacctccacctcctgggctcaagcagttctcctgccttatcctcccaagtagctgagataacaggcgtgcactacaatgcccggctaattgtttttttattttttattttttttgagatgtagtttcgctcttgtcccccaggctgaagtgcagtggtgtgatctcggctcaccgcaacctccacctcccaggttcaagcgattctcctgccttaacctcctgagtagctgggattacaggcatgtgccaccacgcccagctaattttgtatttttcatagagatggggtttctccatgttggtcaggctggtctcgagctcccgacctcaggtgatccacctgcctcggcctcccagagtgctgggattataggcgtgagacatcacacctggccctaattttttgtacttttagtagagatggaatttcaccatgttgactgggctggtctcgaactcctgacctcaggtaatgcacccgcctcggactccaaaagtcctgggattacaagcgtgagccactgtacctggccagaaaacttttatataattcttttctgcctacttgaaatagatacaaattattctaactgctaaataggctttttgtcagtatttttgactcaggactgtttttagaacctaggaatcatttatttaaaatgtaaatagcaaagaaaatagaactttattccattttctgttggaagataggagtttaccttcagcacagtcctggttccaagtttcaaaactacctctcatgaagacattagtttatttttcctttaattatagccaattagcaaccaaagaagacctccaatttttaggtgaatttaagataaactgtatgtgaccaatggtgctgtcagttcttctacttgagaactaattatggtggctatttgcaattgagtgtctttgcaatctcttagcagtttgcttataatggccttcacattctggagtaattctgtaataatttttttttctcttctccagttgtgtataatttttctgaggcttcagataattctgtttataattatgtttctctaagtttgtccagaattactaaacaggatatgaacacatactgtgcccaccatgcttcattctgtatggaccagtcacaacatacaattgtgcaattgggcttccattcacaacacacaattgtgcagtaaagtgcacactgccctcaaagtctgcaggcagaatggcctttcttcgtatttgggatctgcaatcattaatagcatacttttaccagatttctacgaaaattactacagggcaacaattaactattccagctctgtctttctatccccctggcatcttcagatgcgaaattctttcaaataccatttggcctgaaaactcaaccaggttcacacatttgcattgagtaagcctgagaatctaaacattttgcttattctcttgtccaaatgcctatgcatgtggcaagggtgcctttggcttgcttttctgccctcctaaacctaaatctgcagttccaaattttgagtccagctaatagggttctccattctgtgttggagcagtcttcatgtggggatttctcctctacttttcctctcctcactgtaacacaatatggagccaagttaatggtacctagaatccacacataagggctgaaatccacctgggattaacaagacagggccaggctttggatcttgtccagtgaaattttgagattgtgtgaggagctcctggtataaactgaatctggtggcagaatctctaagtgtaaagaagcatgttagccaagggaagttagggccacaactgtccagagccatgaatgcatgaatgcaaccccatctcctatgtgtgagttgtattactggagaaagtttttttgttgttgttttttatttgtttatttttttatgagacagagtctctgtctgttgccaggctggagtgcagtggcgtgaccttggctcactgcaacctctgcctccctggttcaagtgattctcctgcctcagcctcccaagtagctgggattacaggctctcatttcttgatacttgggtgaagaacaagtaggaggtctggaggctcaaactgatatgtaaacaaattgcttttattattattatttgccattagaaaaacaggtgaaacagtcatggactctactattcaggaattattattctagagccagtaaatacatggttgaattaagagtaatgtgatcagaatgaagaagggagttgcacagaagacttgggctttatttgggacactgctcttatgttgttgtgagttctgatgtcaccacctgaagggacatcatagacagaagagttgttacaattatttctgttgcttttcccttgttaagaatcgtttctaatatagtttttctagaaagtactacatgttttggttaagtcggttgttagtgtgtcatgcaaaatagagaagaggcttaaaccattaaaatcagaaaaattctgggagtcaagttcttgttggtccagcttagaaaagatagaacacaaaataagccagcagcacagagaagagaagctgagggccaactccctgccccagccctatccagacctatgctctatgagccttgtccaggtctggccccaccctgaaatctcccctcacagaactaattagaactaattacaggagatcagactcctgtttggaacaactattggatctgcagaagtgtaaaacgggtgtctacccttggtgtttcttcagagctggagctcagaatttttccaaacctaaaagcaaataaatgagagcaaaggagtatacatttggaatcttaatgtctttctttctcaatgaaaccagtgcttacattttacacagcaacctgttttacacttctgcagatccaataattgttccacagtcatgagaaagtaaatagaaacacaacaattaaaagtctctctacttatcccttcctttctatatccctcccatctgtctgtatttagcttttatagtgatagggaaaccagaagaaatagcctaagccatcatctaaatcctactgggaattatgagacacttagtacccacctttcaaaattttttgaggcttaaccgacacaatgcgagtttcccagcacagcacattacagcatacatggtgagcacatagtacaagctcaataaacactgtattaatgtatgtgtacatgttgttcaaatgcagatgtagacattactacattctccagcctctgtaaactttaaaaagctggcaaagcatgtgatcctctgagacagtgacttgtggtcttcactgtaacaaaaagtatttgtgttgcaataaaggtattagatgtaagggactctgtgtgctatactttctctgagtgctggagagcaacatcagcattaacagggaactttcgataaagaagccaatttctggacccctccaaaacctgcagaatcacattagttagagagtggctcagaataccaaatgagctatatgcacatcgaagcttgagaagcaatggtcagctaagtggttcttagcccaggcttccagttaggatacatgacaagtttgaagaaataccagtgagaggtgacagcgtgctggcagtcctcagagccctcgcttgctctcggcacctcccctgcctgggctcccactttgtggcatttgaggagcccttcaggccccccactgcacttgggagcccctttctgggctggccaaggccggagcccactccctcagcttgcagggaggtgtggagggagaggcatgagcgggaaccggggctgcgtgcggcgcttgcgggccagctggagttccgggtgggcgtgggcttggtgggccccacactcggagcagccagccagccctgctggccccgggcaatgggggacttagcacccgggctagtggctgcggagggtgtactgagtcccccagcagtgctggcccaccggcgctacgctcgatttctcgccgggccttagctgctttcctgcggggcagggctcgggacctgcagcccgccatgcctgagcctcccacccactccatgggctcctgtgcggcccgagcctccccgacgagcaccaccccctgctccacggcgcccagtcccatcgaccacccaagggctgaggaatgcgagcgcacggcgcaggactggcaggcagcttcacctgcagccccggtgcgggatccactaggtgaagccagctgggctcctgagtctggtggggacgtggagagtctttatatctagctcagggactgtaaatacaccaatcagcaccctgtgtttagttcaaggtttgtgagtgcaccaatccacactctgtatctagctgctctggtgaggacgtggagagtctttatatctagctcagggattgtaaatacaccaatcagcaccctgtgtttagctcaaggtttgtgagtgcaccagtcgacactctgtatctagctgctctggtgaggacgtggagaacatttatgtgtagctcaaggattgtaaatacaccaatcggcactctgtatctagctcaaggtttgtaaacacaccaatcagcaccctgtgtttagctcaaggtttgtgaatgcaccagtcgacactctgtatctagctgctctggtggggccttggagaacctgtgtgttgaaactctatatctaactaatctgatggggaggtggagaacctttgtatcttgctcagggattgtaaacgcaccaatcagcgccctgacaaaacaggccactcggctctaccaatctgcaggatgtgggtggggccagataagagaataaaagcaggctgcccgagccagcattggcaacccgctcaggtccccttccacactgtggaaactttgttctttaactctttgcagtaaatcttgctactgctcactctttgggtgcacgctgcttttaagagctgtaacactcaccgtgaagatctgcagcttcactcctgaagccagcgacaccacgagcccaccagaaggaagaaactccgaacacatctgaacatcagaagggacagactccagacgcgccaccttaagagctgtaacactcactgcgagggtccgcggcttcattcttgaagtcagtgagaccaagaacccaccaattccggacaaaccagtacctgtgtcttccctacaggttatgttttttcatgattagattcagattagtatttactttcctctccactaatatcacggcagtaattatgggcccatctgtgcattggcctctggatccaatttgtctaattacagctgacactaactttattcatctggctaaggtgttttctgccaagtttcttcactataaagttatttttctctttattatgaatgagtatcttggagggatggatttcccaagtgaggtttataaattgtcacatttaattgaaaaactctgtttctttttctttttaggtttttttgtttgttttttgcttatagcttgctttggagaacaaatctcatttttgttgactgtagatatcagcttttgaaactggaagttctaaaaaaggtatcagttttgtaggtttttattttatttcatctttattttacaagcatacatttcattttctgtattttcagagaaagagaacaaaaattaatatatagctaatatgtcatcttaaaaatctaaaatataacatggcacataaagccaaaaaaaaattttttttttttgagatagaatcttactttgtcgcccaggctatagtgcagtggcacgatctgagctcactgcaaccttaacctcctgggttcaagcaattctcctgtctcagcctcccgagtagctggtacgacaggtgcatgccaccatgcctggctaatttttgtatttttactagagacggcatttcactatattggtcaggctggtctcaaactcctgacctcaggtgatccacctacctcagcctcctaaagtgctgggattacaggcatgagccactgtgcccggccaaagcaaaaaattttaagaaacacccgattcagtaacaatagctcttaatttagtttatatcattaaatgttttgatcttcatccttgttttaggaaacacaaaaaagcatgcacaaagaggcttataatttttatataatttaaaatatttcttcatttaaacagaaatgttctactctccaacttttcatgtgtacatacttaccatttctgtgggtgtgtgcataaaatgtaagcatcatttgatcaattttctgttgttgccttgtttatatcaatcttctcagttatgaaaactgctctggatgttgttttacagttatctctgtatattggctcataagtccttttgagataaatttcaagtcagataaataggggtaaaacgcaaagctcagctgggcgtggtggctcacgcctgtaatctcagccctttgggagggtgaggcgcgcaaatcatgaggtcaggattccgagaccagcctggccaacatggtgaaaccccatctctactgaaaatacaaaaacttagctgggcgtgctggcaggcgcctgtaatcctagctactcaggaggcagaggcaggagaattgcttgaacccgggaggcggaggttgcactgagccaagattacactactgcactccatcctggcgacagagcaagactccgtttaaaaaaaaaaaaaaatacaggctgggcgcggtggctcacgcctataatcccagcactttgggaggccgaggcgggtggatcacgaggtcaggagattgagaccatcctggctaacatggtgaaaccccgtctttactaaaaatacaaaaaattagccgggcatggtggcaggcacctgtagtcccagctacttgggaggctgaggcaagaaaatggcatgaacccgggaggcagagcttgcagggagccgagatcgcgccactgcaccccagcctgggtgacagagcgagactcagtctcaaaaaaaaaaataaataaataaatacaaaaatagcactcaaaaatgtatattcttatattgattcgtgtttatattttgttttatatgtgcatatttatgctagttttgtggatcttatatttccacagaattagagaatatattcgaaatattactgtgtttaaaagtatcttatttagtaactcaggtcactcataagtcagaaccagttgtcttaactttcttatttcatcttgggtcaaattaggaactctgcccttgactgcatgatcaatgtgttatttatttttattagagaaactgttgacattcagggatgtggtcatagaattctctctggaggagtaaaaatacctgaacccttctcagcagaatatgtatagagatttgatgttagagaactatacatacgttgtctctgagtcggaataacttaccttcagaatatctaatgtctaataactatgataccgtaccttgttttaacctgattgtctctcttagctgagagagccggacagactccattttagtttctttacttgcagcccctttacccctctcccttaagggcataaccagtgcaagctgactccaagcacatccaggaatacacttactgataagatactgaggcaagctgtaccagcagctcctgggaatgcgctcaaagcccctgcgtttatcactttgtgatagtttaagcccctgcacctggaactgttcattttttctgtaactgtttctgtaaccatttatctttttaactttttgcctgttctgcttctgtaaaattgcttcagctaggctcccccctccccttgtagactgaggtataaaaggaaatctggccgggcgtggtggctcacatctgtaatcccagcactttgggaggccgaggtgggcgaatcacgaggtcgggagatcgagatcatcctggctaacatggtgaaaccccgtctctactaaaaatacaaaaaattagctgggcgtggtggcggcgtctgtagtcccagctacttgggaggctgaggcaggagaatggcgtgaccccgggacgcggaggttgcagtgagctgagatcgcgccactgcactccagcctgggtgacacagcaagactctgtctcaaaaaaaaaaaaaaaaaaaaggaaatctagccccttcttcggggccgagagaattttgagcgctagccatctctcggtcgctggcaataaaggactcctgaattagtctcagagtgtggtgtttctctacaactcgctgggttgcaacataacaagggctttatttctttcctttttagaatgtctccttgggaggtagtgctttgtctgaatgaatttcagagttttgctttcaggaaaaaaaaaattctaagtttgttgatgtagaaaaaaatcttcctagtgtttccagccctcccccttagttttgattcattcaaacttgaaaatgaagcacagaatttctaaacgtaaaatacttcctacatattctaaagaagctggtaggaaacagtattttggggaataatttttaaaaatcttatataatgtccccttttctccactgagcacagtactgagctggcaattacatatcctccagcattaatcatctgactttttattaaaaaacaggtcttgccatctctaagctggacctggtgacctttttggagggaaagaaagagccctggactgtgaagagtgaggagaccatagctgcacagccaggtaagtgggagtaaagatggtaggtggcctgggtgagaggttcaaaggtcaataagccagattttcttttgtcttccattattttattattttttatatatatatatatatatatatatatgtgcagatctgttttatgtgcaacaattgattctatcagataatcagaccaaggcattccactggtaattttccctcaaatcaattcaggtgaaattagatatttatgtacttcctgggctatcaaaacttgagatttcattatcaacttcagttctgaagccatacacacaattcaaaatatacattaactaggttaagtcaataaaagtgggctgaaagaaaccacaggattcaaacaatgaaaccatgtattttgtttgcctgagagtcacaatgtgaacaacaattatttcgcatatctcatagctcttcagtgtagagggagtggcttctgaacataaggtcattgcacagcaggtgggcaaacagctggtgtggcctcctggaggcttcacccagtgctgatttcttctctgcctctccttttttaggttctatttttttcatctttcatctttcctttttttttttttttcccttgagatagagtcttgctctgttgcccaggctggagtgcaatggtgcaatcttggctcactgcaacctctgaatcctgagttcaagtgattctcatccttcagcctctgaatagctgggattacagttgtgcgccacgatgcctggctaattctttgtatttttttttagtagagacagggttttgccatgttggccagtctggtctcgaactcctgacctcaagtgatcctcatgcctcggcttcccaaagtgctggaattacaggtgtgagccactgtgcctggcctcctttcctattttcctatttttttctccctttttgtctctctctttctatgtgtctttccctctgtttctctcttccttttttttgttttgtatttctctcttcctccttctctctttccctttgtttctttttaattttttttccttgtagaacttggtttattttttccttccttcctacctttctttcttcttttcttccctcctttcctcccgcctgttttctttcctactacatgagcatgccatcatgcctggctaaattttttatttcttgtagtagagacgaggcctcgctatgttcccagggctggcgtcaagctcctgtgctcaactagttcttccatttcagtttccccaagtgttgggattataggtttgaggcaccatgttctgccctctttttattttctttttcattcttcctttttttttttttttttttgctctctctcttgcttgcttgcttctttccttcatttctttctttattctacatttttctttttttcttttttcttttctttttttttggagatggagtttcactcttgttgcccagcctggagtgcaatggcgtgatcttggctcaccacaacctctacctccctggtttaagtaattctcctgcctcagcctcccaagtagctgggattatagacatgtgccgccacgcccaggtaattttgtatttttagtagagatggggtttctccatgttggtcaggctggtcctgaactcctgacgtcaggtgatctgcccaccttagcctcccaaagtgctgggattacaggtgtgagccactgcacccggctctttttttcttttcttctttttttttttttttttttttttgcgttagtctcgctctgtcacccagaggtaggtgggaagctctcagacttagtcgccagagggacagctttgggcgcgagctccacacgtggcctgcagggtggacctagtggcttcctggtcacaccatcaggtgaccagatgtgggctgagctgtggccagtacttgtggccgctggccacacgtttgggttgatcagagattcaaagcttaggaaggaaggtcagcagacttagaggccggccactgaggtgggccaccttggggggaataagtttccaacggggacagcttcaggccgcaagcgccacacatggcccagggtggaactggtgggcttctgcctccgccatgagctggcttctccttctggctgccaggtctacaggatgtcggccacaagcgtaggacttggtcgccagcttaaaatgtttaagggggaccagatggttctcgccagtgcagtaccgcttaggtccaccagaaaagctcaatgatggctcactgtgccctccaccttcctgggctcatccaggtgatcctcccattttggcctcccaaatagctggggatctggggatagttctgtgttttgtttgtttgtttttttctatccccactttgagtttgtttccacagtacattgagttttgttggtttttgttttttgggttttttttccctctctctctcatgctccttcctgtacactgcagttgctgttgttttagatttctttcacctaggcttaagtgcagttacttgatcacagctaactacagcctcgacctccctgggctcaggtgattcttctgtttcagacaccctgcttccttagtaactgggactaaaggtatacggcaccacactggcacattattttgcatatcttgctttttatttttgtagagatggggttccatcatgttttccaggctgatctcaaactcccacggtcaagcgatctgctggcctcggcctctcaaggtactgagcttacaggcgtgagccaccatgcctggttctatctctgtctgtctgtctacctacctaactacctacctacctacctacctacctgtaatcaatctatcatctatctctcctttttttttaagaagagacttggtcttgctatgtttttcaggctctggttttatatatatatatatatatatatatatatattttttttttttttttaatttatttattattttttaatataggggttgtctcaccatgtggcccccaggatagtctcaaactcctgggctcaaagtatcctcccgccttgacctcccaaagtgctgggattacaggcatgcaccaccatgcacaatctggtcatatttttgatgtgttgattctttccagtccagatgtataatctcatccctgaacatttctgatggtgtgattatgacatgtgactttatctggcaacagagtgagttgttgctcccgcctgagcccagcccccagaaaggattgtgacatatcgttggacccagaattgaggtaatgtaactattccactgccttggcactgcccacagaagacattgtgacatattgctgggtcttgtacccaggtggtgtgaatcttctctcctgccttggctcttccacagggggcattgtgtcatatcgctgggccccacacataggttatgtgactcttctgcctgtgccctgcccatgtggcccattgtgacatactgttgggtcccaaacctaggtgatgtaactctactgcttaggccctgcctacagaggacattgtgacatatccctgcatccatcacacaggtaatgcagctctcttctgcttggcccctactcacagaaaggattgtgatgtatcacagggctcagcacctagctaacatgacttttctcctcttctaggtttttgcccacaggggatattgtgacatgtcactgggcctaatactagggtgacagtactcttgtgtcatggcactgccctcagcaggtgtggtgatatattactgggcccagaacaaatgtgatatgagtctcctgcctggaccctgcctacaaggtgcattgtaacatatctggggccctttgactattttattttatttattgtattatattttatttattttaattttatttttgagacagaatctcactctgtcacctaggatggagtgcagtggcgtgatctctgctcacttcaacctttgcctcctgggttcaagtgattctcctgcctcagcctcctgagtagctgagactacaggtgtgtgccgccacgtctggctgatttttgtgttttcagtagagacaagatatcaccctgttggccaggccgatatcaaactcctgacctcagccagtccacccgccttgacctcccaatgtgctgagattacaggtgtgaaccattgctcttggcaccctttgactattttatgtgactcttctctcttacctggacattgaccaaatgggcccagcaccaaggtgatatgactctcctctcctgcctgggccttgcccttagaagagagagtgacttactgctgaatttagcatacaggtgatatgattcttctgctgactcgcagaagtcactgtaacatatatgtgggcccattgctgaggttgtgtgactctcttctccctgggacctgtccacagtagggattgtgacatattgcttggccaagcacctacattgtgtgactttttatttatttatttttttaagacagagttttgctcttgttgcccaggctggagtgcaataccatgatcttggctcagctgggattacaggcatgcgccaccacacctggcaaattttttttatgttttcagtagagatggggtttctccatgttagtcaggctggtctcaaactcccaacctcaggtgagccgcctgccttggcctcccaaagtactgggattccaggcatgagccactgcacctagcttcgatatgactgtcttcttatgccagggccctgccgactggagtgattttgacacatagctggggccagctcaaatgttatgtgactccacacttcttcctgagccctatctgtgaggggcactgtgtcttatctctgagaccgttaattaggtaatataacttttatttttttgagacagagtctggctttgttgccccggctggagtgcagtggtgtgatcttggttcactgcaacttccgcctcctgggttcaagtgattcacctgcctcagcctcctgagtagctgggattacaggtacacatgccaccacgcccagctaatttttgtatttttagtagagatgaagtttcaccatgttggccaggctggtctcgaattcctgacctcaagtgagccacctgccttggcctcccaaagtgctgggattacaggcatgggccaccacacctggccaatgtaactcttttgtttggactgtcttcttggggtattgtgatatattgctgggcccagaatccgggtgatgtgactctgctgtttcatctctgcacaaaaagggattgtgacataccactgggtcaagaacctagatgaggtgactctcctctccagcctgggacctgcacacattgtgtactaagacatatcactgagtctaacacctaggtaatgcaactctcctgcatgggccctgcccataggggtattatgaaatatctttctgttaatcacctaggtgatgcgacactcctcttctacctgggaactgccaaaacaagtattggtacatatcactgggcccagcacataggtgatgtgactcttttctcatgcatgggctctgcgaactggggtgttttttacatatagttgggcctaaaccctaggtcgtgtgattcttttattttcctgagctgtactcacagagagcattttgacatgtttttgggcccgtaatttagatgatgtgactctcttggatgggccttccccggaatgggtattgtgacatattgctgagcccattatataggtgatgtgactctcttgcatgggccctccacataaggggtagtgtgacatattgctgagcccagtaggtgatgtgactcttctctatggtttgggctttgcccaagcagggattgtgatgtgttgctggactcaccacctatgtgttgtgactctcctcttctgcctaagccctgcatgcattgtgtgttgtgacatgcctggattcaacacctaggtgatacaactttatggcaggggaaccacccacagaagtattgtatcatctttccatcacttaggtgatgtgattcttttatttttcctgtttctggcatattttgggtatagtgacataccattgagttcaacacccatgaaatcggaggcttctgcctgagcccagcacataagtgaccttgtgacatatctttgcattcattatctaggagatttaactcccctttttgcctgcaccctgaccactgggaagattgtggcaaatcaccggtctcagcaatcaagtgatgtgtttttcctgcctggtccttgcccacagatcattgtaacatgtcactgggcctagcatccaggtgatgtgactctgctgactatattctgctttcaagaggagattgtaacgtatccctaatcgagcacccaggtggtgtgacacttctgccctatccctgcccttagagatgattgtgacatattgccccaaaaggcaggtgatgtgagtcttctggtcaatccctattcactggtgggattgtgatacatatcttatccaaacttataggggcaatatgactctcatacctctaaacaaccaatagcagatacactagttctcatagccagggtcaggaaaatgagtaatgtcttgggtttcttctttgtatgaaggtcataaagaattaacactctgtcacatactgtgtaaagtcgtcaagaggtacagggaatgtcctaacagaactcagcacacaggggaggttgcgacactcatatgcatagcctgccaacagtaaagactgtcatccttccacataaacacagctcactgttgaggttctgaatctcatacccagatgaagttgaaagttagaaaattaaatctcatgttaattcgatccatagagaggttagtgtctctgagaccaagattcagcacacctgtgagtcagtgacttcattaaaatgacagaatttgcaggaaggattgaagttctcatgcacaaatccagaccatcattgagactgtcactcaggtacttacacccaacatacagagggtattttgtctcatacctagaactaagaaatgtgtgaaattgttaatctcatacctcgaccttaattcaggtgtgtttgtgacatacaccttttttaagcacctaagtaatttgactctcctgcctgggcccaacgtacagatgggattgtgccatatttctggacccagcatttaggtgatgtgagtctattctcttgtcttagtgctttccacagagaacactggacatatcacagggcctagtgcccaggtgatatgactttcctctacttcctaggcttttcctaagaagggattgtaatatattgctgggtcagaacctaggtcgtgtgactctcctgtgctgcctggttcctcttgtacattgtgtattgtgacatgtggcttgttctaacacctcgatgatgtgaatctcctgcatgggccctgtccacagaggtattataacatatctttttattcatcacctagatgatgtaactcttttctatctgggccctgccaaaagggaggattgcggcatatcactggacccagcatctaggtgatgtgattctcctgttttccctgggcctcaaatattttggatattgtaaaatattgctaggcccactacctatgggattgcatgctcctgcctgggctctgcccacagggaccttgtgacatatatctgcgtccatgacctaaaaggtgacacttcttgcctgcactgtgccctgaacaggaaatattgtgacatatccctggaaccagacaccaggtgatatggctcttctgcccctgtcttgcccccagggagcattgtgacatagtgcttagctcagcacccaggtgatgtgactctgttgcctgtgctgtgctttcaggagagaattgtaacatatccctggctgagcacccaggtgatatgacactcctgcttgtttccttccctcggggaagattgtgagataccttggctgaaatcccaggtgatgtaactctcttgctaactccctacctacaggttaaatggtgacatatactatagtcagcttataagtggaatgatgactctcatacctctagtcagctattggaagaaatactgtctctcatagctcgacttagataaatgagtcacttccttggtcttctctttttatgaaggtcataaagaattgccacactctaacatattgtataatgccctcgagtgttacaaacgtgttatcccagggcacacagcacaaaggtgagattgtttcttatatgcacacctcaccaattattaggattatcaccctcacacagggaaagagcctatggctgaagtcttgaatctcaaatgcaaacagaatctcaaatgcaaacactgtccacagttggaattgtgactcatgtatgagcctccaaccacagttgagatggtgacacatttctaaactcagaacatagcagatgaggactctactctcttaaacccaacaaattaagagagatgttgactaatacctgggcttagggccacaagtatggtcatgggtgcttacaaacatgattttagagtaaattgtgcctctcatttatactggataaagcctttgagtagtatagtgtactaaccaggcgcagtggctcacgcctgtaatcccagcactttgggaggccgaggtgggtgaaacgaggtcaggagttcaagaccagcctgaccaacatgttgaaaccccatctctactaaaaaatacaaaaaattagctgggcatggtggtgggcacctgtaatcccagctacttgggagcctgaggcaggagaattgcttcaacccgggaggtggaggttgcattgaattgagatcatgccactgtactccagcctgggtgatagtgcgagactctgtctcaccaaaaaaaaaaaaaaaaaaaaaaaaaaagagtgtactaacaagacccagcacacagaggagattttctctttttctttttctttttttcttttgagatgaagtcttgctctgtcaccccagctggagtgcagtggcgcgatctcagcttactgcaatctccacctccgggttcaagtgattctcctgcctcagcctcctgagtatctgggattacaggcacataccaccatgcccggctaatttttgtacttttagtagaaacagggtttcaccatgctggccaggatggtctcaatctcctgacctcgtgatccacctgcatcagcctcccaaagtgctgggattacaggtgtgagccactgcagccggcctggagattttcactgttatatgaacacccatcaaaaagtatacatcatcatattctcacataaacacagcccacttttgaagttctggatcacacctagaggaagtcaaaggtggaaaaattgactcttatatatggatccagtccataggtgagttggtgacactcagagcaagattcagcatgcgtatgaggctgtgacttcactaattagacaaagtccacaggaggagtataggctgtcaggtacaaatttagttcactgttgacattgtaactcctgttcttagacacaacatataggaagggttaacctcctttacctaaaaccggaacatgtgtgggattgttaatttcatctctgcaccttcccacaggtttaattgtaacatttttctctgcccagcacctgagtgatctgactctcttgcctaagaccagcccacagatggaatagtgacacatagctgaacccagaactgaggggatgtgattctatttttctgcattggtgctgctcacaggggacattgtgacatatcgctggaccttacacttaaatgatttgagtctcctcccctgccttggcactgcctacggaaggcgttgggacatgtctctgagccctatgcccaggttatgtgactctcctgcctgttccccgaccacataagcaattgtgacatattgctgggtttgacaccctggtaatgtaactctactgccaaaaaggagcattatgacatatatttccattcattacccaggtgttatgactctcttctcctgcctggtccctgctcacagagggaattttgacatatcccttggctcagtaccaacaagtgtggttcttcttccatcataagttctgctggcaagggagatggagacatattgtggagctctatgccaatgtgacattactgtttgctttggcctggacctcaaaaggcattgtgacatattgctgggcccagcaacatggtgacatgagtctcctgtatggaccatgacaacagagcattgtgacatatctttaagagcatcaactatttgatgtgactctccttttctaccaaggtttccccacaatgagagattgtgacgtatcttctgacccagaaatcaggtgatgtgtttctcctgcctgagctttgctcatagggagcattgtgacatatcactcgtctcagctcccaggtgatgtgactgtactgtctgtgccctggtttcaggaggaaatttaacatatccctgactgagcacccaggttttaattcttctgcctggtgccttctctcagagaagtttgtgacatatccctggcctattacccagatgatataagtctcctgctcactccctatccacagtggagattgtgacatcttttttcagatcataggcacaatgttggctgtcatatctgaaaccagtcaataggagacatactatctctcatatgtgggcttaggtacatgggtaagattgtcactcttctctttttaggaaggtcagagaaaattacactctctcacatattgtataaagtcctcaagtggtatacagagtgtcataacggctctagaaaacagatgggattgtgatttatgtatgcacactttgccaattgttaagattgtcaccctcatccatggacaaagcctactggagaggtcttaaatcttacatgtggatgcagtgcagagttgaaattgtgactgtcatatgtgaacatcaggcaacagctgaggtggtgactcattagtaagcctagcttatagggaggtaacaactctcatatctggacccagtcattatagaggtgttaactctcatatctgggcatagagccacaggtacgattatgggtcgataccattacaattgtctcccagtcacaaaagattgcgactctcatgggaaccttataaattcctcggttggtacagggaatgttctaactaggctcattgtacagttgaggttttgacactcaggcacacccagccgacagtaaagattgtcctcttttcacatgaatacaatccactggatgttctgaatctcatatccagagacagttgcaagttggaaaatttactcttataagtgaatccagtccaaagttaagttggtgactttcagaccaagattgaacacactgttagtctgtgattccactaaggtgaaacagccagtaagagggattgtgtctctcattcaatgattcaattcattctaaaaatgtgacttgtgtacttggatttaacatacaggaggtgttgactctcataccaagaattggggtatatacaggattgttagtctcatccttggtctttccttcaggtgcagttttgacacacttctgtctagcagctgagtattgtgatcttcagaactggcccagcctacaaataggattgtgccacactgctggacccagcacctagatgatgtaactattctcctgccttggtgctactcaaaaaagacattaacatatctcagagccttgcacccaggtaatgtgagtctcctctcctgccttgctgctgcacacagaagcgggttatgtacaggattgttaatctcatttggaccttcctgcacctatgattgtgacacatgcctctgtgtagaacccaagtgagttttctctcctgtttggatttaacccacagatggaatcgtgacatatcgctgcaccagaaactaggtgatgtgactccatttccttgcctctgtgctttccacattaggcattgggacatatcactgggccttgcatccaggtgatgggagttttctttttctttctttctttctttcttttttttttttttgagacagaatttcgctcttgttacccaggctggagtgtaatggtgcaatcttggctcaaggcaacctccgcctcctgggtttaaacaattctgtctcagcctcccaagtagcttagattacaggcatgcgccaccacgcctggctaatttttgtatttttagtagagacagggtttctccatgttggtcaggctggtctcgaactcctgacctcaggtgatccacctgccttggcctcccaaagtgctgggattacagttgtgagccaccgtgcccggccagtgatgggagttttctctcctgctttggtgctgaccacagtgagcattgtaaaatattgctgccatcacccctagattatgttaactctcctctgctttgcccacgtggttcactgtgacatattactgggtctaaaacccagaaaatgtaactcccttatttaggttctgcctgcaggagccattgtcacacatctctgtgctcaccacccaggtgatgtgactgccttttactgcctagttccttctcacaaaacatcttgtggcatactgctaggcccagtacctggctggtgtgactcctctcttctttctaggttccacctgcagcaaagattgtaacataccgctgggcccaacagcataatgacgttattcttttgccttgggcctgccctcagaaggcactataaaatattcatggccccagcgccaaggtgatgtgtgtctccagcctggatcctgcccacagagggcattatgacatatctcttggcccatcagatgtttaatattatctcctcccatttcctaccctgtgtttgcctgtaagagacattgtcacatgttcctgggcccagcacctaggtgatgtcttcctgagacctgtccatatggggattgtgatatattgtgtggcccagaacttacttgatgcgactctcctctcatgactaggccctgcttacaggtgtgattgtgacacacagcttggcctagcccctaagttatgttactctgctcttattcttcagtcattttcacagggggcattgtgacatattgctagactgagaacttaggtgatgtgactctcctctactgcttggaatattcccaaaaagagagtttgatatattgcttagccaggatcctaggtgatgttactcttttctcctgcctaaaccctgcatacattatgtattttggcactggggccacaacctaggtgatgtaactctcctgcatgggctttgcctacaggggtatgatgatgtttcttttctttcatcacccaagtggtgtgactctccacttatgcctgggtcttgatgaaagaggaattgtgacatatccctggccctagcacttaggtgatgtaacttgcctttattgccagggcatggcatattatgaatattggacgtatctctgggactgacacctaggggatgagaggttcctgccttggccctgcccacaggaggctttgtggcatgtctctggcctcattacctagaaagatgtgactcttctcttctacctgcattcttcccacagagaagattgtgacatcactggatccagcaattagaaaatgtttctctcctgcctgagccttgcccacaggaatattgtgacatatccttgggctcagcacccaggtgatggaactctgccacctgtgccctgtctacttaggctattgtgaagctggtttcaatacccaggtgatgtaacattcctgccaggccactgccttccagggatattgttacgtacctttgtgccaatcaccaaggtgatgtgaatcttttcacctgcctagtccttgttcactaggggataatgatatctattgctggtttcagcaccaagctgatgttacttgcctcttcttcacagattctgctcacagaaaaactaacacatcactaggcccatcagcgaaattattttgcctggccctgcccttaaaagacattgtgacatactacagtgcccagcatcaatgtaatttgtctcctgcctaaaccctgcctactgggggcattgtgacatatctcttggcccatcaactatttgatgtgactctactttcttacctgggctttgccaatagtagagcttgtgacctatctctgggcccagcacctagatgttatgactctcccgcctggtccatgcacacaaaaaagagagtgacttatactaggatcaacacacaaatgattctattcttctgcattatcccagcccacatggcttattgtgacatctctaggttcatcatctagatgatatgactctccttcctgggaactgtccataatgaagattgtgacacatcacttggcccagcacctatgtgatatgactcctttcttttgcctgggcctatcagtttgggtgattgtgtcatatagctttactcagcaccttgattatgtgactctcctgtttctcctgagtcctacccacagaggtcattgcaacatatccctgagcccctaatttaggtaatttgactcctgcctgggccctaccctcattgatttttgtgacatagtttttgactcagcacctaggtaatgtgattcttctccactgcttggactctgtcacagaaggtattgtgatgtatcactggggctgacacctaggtgaaggtactgtcttctcctgcctgggccctgcataaattgtatattttgacatttcactaggttcaacacatgggtgattcaactctctcacatggaccgtgagcatggggttattgagacatttatttttgttcatcacctaaccgatgtgactcctctctgatccctgtcaaaaggaaagattgtgacatatcactggaaccagaacttaggtgatgtgactcttctgtctaacaaccacatattttggttattgtgacatttcactgggccaaacacctcagccctgtccacaggggttcttgtgacatatatctgcatccattacataaaagatgtgatgccttttctacctgcaccctccccacaggaaaggttgtaacacactgcagggcccagccaccaggtgatatgtctctcctgcatgtgcataactttcaggagaaaattgtaacatgccactggttgaaaacccagatgatgtgactctcctgccttttcacagccctcagggaaaaaaattacatatcatttgcccagcatccaggtaatgtcactctcctgggtggtttgtgccaacaagttggttggtaacatatatctcggcccagctcacaggtttgatggtgactctaatacctcctaccagccaatagaagagacactgtctctcacaggtaggcttagaaagaggagtaaaattcctggctgggtgtggcggctcacgcctataatcccagcacttcaagaggtagaggtggacggatcacctgatgtcgggagttcaagaccagcctgaccaacatggaaaaaccctgtctctactaaaaatacaaaaaattagccaggtatagtggcacgtgcctgtaatcccagctactcgggaggctgaggcaggagaatcgcttgaacccaggaggtggaggttgtggtgagctgagatcacaccgttgcactccagtctgggcaacaagagtgaaactctgtctcacaaaaaaaaaaaaaaagaaaaagaaaaaggagtaaaatcctggtggtctctctgtatgaaggttatagagaattaccactctcttgtatattgtgtaaagcacttggatggtacagagcatgtcttctgtaccataggacccagcaaacaggttagatcatgtttcatgtaagcacatcctgccagtttttaggattgtcatcctcacacatgaaagagcccactgactgatgaggtcataattctcatggatggatgcagtccatacttaaaattgtgactatcttatgtgaacatgtggccacacttgagatggtgaatcatttctaaacccagctcatagtggtgaggactctcctctctggacccagctaattggagagatgttaaatgtcatacctagacttgggaccacattagatcatgtgttcagagcaggttgcaactctcaggcacaccatatacagtccacaagagagtgtcctgacagagagaagcacacaggtgagactgaaatttatattcacacccagtcaataccaaagattgtcatccacttaaacacactcttcttttgaggttctgaatctcacttttggaggcagctgagtgttggaaaattgactctcatttgtggatttttgtccacagttgggttagtgactcgttaaccaaaattcagcacacctttgtgactgcaacttcactaaggagcataatttatttattttgagatggagttttgctcttgttaccgaggctggagagcagtggcacgatcttggctcactgcaaactctgcttcctgggttcaagtgattctcctgcctcagcctcctgagtagctgggattacaggtgcccaccactatgccagctaattttttgtatttttagtagaactggggtttcaccatgttggtcaggctggtcttgaactcctgacctcaagtgatccacttacctcagcctcccaaagtgctgggattacaggtgtgagcctccttgcctagactaaggcacataatttgcaaaagaaattgaggctcttatgcacaaatccagtccaccattgagactgacccctgtacttagacccaacatgcaggaagtgttgactgtcattccttgactcaggacatgagtgtaattgttaatgtcatcacaagacctttctacaagtgtcatgtgacatacatcttagcccagcatctgagttatttgtcttttcctgggaccagtccacagtgccatatcaccgggcccatacccttggtaatgtgattctattctgctttgataaagcgcacagtggtcattgtgacattgcttggtgttgcacccaggtggtgtgagtcggctcttctgccttggtgctgcccacagatgtattgtgacatattgctgggcctatgttatgtttatcttttgcttgtgccctaaacacatagcctgagtccaacgaccaggtgatgtaacacttcatcctggaccggtctacagaggggattgtaatatatgtcttcaccaatcaccctggaaatgtgacttacttttcctgcctgtccctaatcacagggggtactggaacatattgttgggcccagcacgtagctgatgtgacaatttttttttgggttctgctcacaaaagagattatgacatgtgattgtgcctaacactaaggtgatgttactttttttttttttttgctttggctctgcccttagaaggcattgagacatggctgggctcagcactaagaagatgtgagtcctctgcctgaagcctgaccacagggagcattgtgacacatttcttgacccattacaatctcttctacgggcaaagctgaggtaaatgcccgttttacctatgtgatgtgacattcctcttctgcctgggccatgcccacagaatagagtgacgtattggtggggcaagcaaaacagtggtgtaattattctgcctggtccctgtacacaggagtcactgtgatacatgtttgggcctcccacctagatgatgtgacttttttcttctggagtttgtccacagtgggaattgtgatatgccacgtgacatagctcctatgtgatgtgactctttctcattcttggcctctttccactggggttactggaacataaagctgagcccagctcctaggctgtgtctctcctttctaagccctacccacaaaggacattgtgacgtatctctaggcttctcacctaggtaatattacttttttacctaggcccacccctcaggggtattgtgaaatactgctggaccaacatgctagatgataggagtctctgctactgcttggggtgtgattaagaggaaattgtgatgtgcatttgggtgcatccagcacctaagtgatgttaactctcctcttgtgcctgagacctgcatgcaatatgtgtttttgtgttttttgtttgtttttgagatggagttttgctccttttgcccaggctggattgcaatggtgcaatctcagctcaccacaaccttcatctcccaggttcaagcaattcttcagcctcagccccctgagtatctgggattacaggcatgtgccaccaagcccggttaatttttctaattgtagtagagatggggtttcttcatgttggtcaggctggtctcgaactcccaacctcaggtgatccaccgacctcagcctcctaaagtgctgggattaccggtgtgagccaccgcacctggctggcatcatgtatttcaacatgtctctgggtccaacaacattatgatgagactttcctgtgtgggctctcacacagaactattctaacacatcttttcattcattatcttggcgatttgacttttctgttccgcttgagcactgccaaaagaaaaatttgtggcagatcactggacctagcacctaggtgatgtggctcttctcacttgcctgagacctgcatattttggttattgtgacatatcactgaaacaaacacctaggggttggaaggcttctgcctgagcccctcccacagagggccttggaatatatttttttatccatcacctgggagatgaaaccctctacttctacctgccttcttcccatagagaagattgtgatatattgctgggcccaggaaccaggtgttttgtctatcttttctgggctttgcctacagtgagccttgtgacacccaggtgatcatactcttcttcctatgccctgctttcaggagaggattataacatctctggttgagaactctgtgatgtgactctccttgctggtgcatgctgtcagggaagattgtgacataaccctggctcagcacacagttgatgtgactcttgtgcttgttctctacccacaggtggaattgtgacatataacttggccaagcacacagatgtaatggtgtggtgactctcatacctagaactgggacctgtgcaggattgttaattcattactggacattcctgtgggtgtgattgttacatatgcctatgttcagcacccgagtgatttgattttgctgcctggtctcagtccaaatgtaagattgtgatttatcgctgaatccagcacctcggtgatttgactctccctttttttgtgggagggatcctgcaaattttgggtattgtcaattattgctgaatcctgtacccatgttatgactctcccaaatgtgccttacctgttgtggcacaatatatcacattagacattgttaaatattgttgggttcaacacctgggtgatggatgtaactttttttctgggcctgcctacaggggaccttgtgacataactcaatgcccatcatcatggtaatgttactctcttctcctgcctgatctctgctcacagagaaattgtgacacatcactggcctagcatctaggtgatgtgactctcctctttttttcaggctctgcatatttgggtattgtgacatattgctgaactcaacacctaagggatgggagtctcctacctaggcccttcctacaggggacattgtgacatgtctctgcattcctcatccaggagatgtgactctccttttctgcctacaccctgcctacacagaaagttgtggcatattgctgtggtcagcaaccagatgatatatttctcctgcctgggtctttattacaggaaagatgattgacatattactgggcccagcatccagatgatgtgactctcttcttctgttggtccttgcttacagggaaactgtagcatattgctacacccaacacctagcttatgtgattcttcttttaggtttgccttcagggaacattgtgacatattgctgggccctgcactgataatttgtgactcttctgcctgtgatttgcccacttggggcattgtgacatattgctgggtttaacactcaggtgatgtaacttttatgcctaggccttgcttacaggaggcattttgaaatgtctttgtggctgggcatggtggctcatgtctgtaatcccagcgcttggggaggccaaggtgggcagatcacaaagtcaggagttcgagaccagcctggtcaacatggtgaaaacctgtctctactaaaacaaaacaaaacaaaacaaaacaaaacaaaacaaaacaaaacaaaacaaataaaaccacaaaaatcagccaggtgtggtgattggtgcctgtagttgcagctactcaggaggctgaggcaggataatcgcttaagtccaggaggtggaggttgcagtgagctgagattgcaccactgcactccatcctgggcaacagagtgagactccatctccaaaaaaaataaaataaaataaaataaaaatacaaatgtctttgcaccaatcctacaggtgatgtgactctcttgtgttacctggtctctgcccccaggaagaattgtgacctttcacagcgtatagctaatttttttcttttatttcttagtttttctcctgcaggaaagattgtgaaatattactgaactaagcaccaaagggatatattttttttcttggacctgcccatgtaagaccttgtgacatattgctgggccctacacctagatgatgtgagttttctgcccgtcaactattttatgtgactctcctctcttatcttcactttgtccataggttagcttttaatatacctttgggcctgggtcatgctaatagaagcaagagtgacttattgttgggcccagcacacaggggatgtgattcttctgcttggttcctgccgaaatggtcattgtgacatatctatgggtcagttggctaaatgacaggactctttttatctttctggagcagtccacagtaggaaatttgacatatcgctgggcccagcacatatctgatgtgactctcctctcatgccaaggccttgcctactgtagtgattgtgccatatagctgggcccagctcctacgttatctgactcctgttttcttcctgagccctatgaaaagattgcattattaaatatttctgggtcttttacctaggtgatgtgacttttctttctggcttgtcctctcagagggtattgtgacatgttgctgaatgcagcatttaggtgatacgacccttcctctactgcttggactctgaccaaaaagggattgtgatgcatcactgggcccagcacctacgtaatgggactcttttctcttgcctggaccctacaaatattttgcattgtgacgtgtagctgggtctgccacccaggtaatgtgagtcttccacataagccctggccacaagagtattatgaaataactttttattcatcacctaggtagtgatgtgactcttcatcagcctgtaccctgccacaagggaattgtgttgtgtcagtgggtccagcacctagatgatgtaactcatcttttggctggacctttcatattttacatgttgttacatatcactgcatctgacattaggggatgagaggcttctgcctgggccctgcccacagatggcctcgtgacatattttggcatccatcacctaagaaacgtggctctcctcacctacatgcaccatgcacaaagaaaatattgtggcatatcactgggatcagccaccaggtatgtgtctatcctctcagggtgttgctcacagagagcgttgtaacatatcactgggcccagcacacaggtgatgtgacttgtggcctgtgcctatctagcctttttttttttttgaggcagagtctcactctgttgcccaggttggagtgcagcgatgtgatcttggctcactgcaaaatctgcctcctgggttcaagcagttctcctgccttagcctcccaagtagctgggattacaggcatgcattaccacaccgttctaatttttgtatttttagtagaggtggagtttcaccatgttggccaggctggtttctaactcctgacctcaggtgatccacttgccttggcctcccaaagtgctgggactaccagcatgagccactgcacccagtctacctgcagccatcttataggattagattttaatccatccccagccaagaacctagatgatgtgatatgactctcctgtctggtccttgccttcaaaaaagattgtgacatacctttagatgagacccaggtgatgtcactcttctgctcacttcctacccaccagtgtcattgggacatatatcttgcttcagcttgcaattgctatgatgattcttataccttgaaccaggcaataaaagagttatagtctctcctagctaggcttaggaaaacaaacataatccttagtctcctctttttgccaaggtcatagagaattaacactctctcaaatattctataaagccctcgggtggcacagagagtgtcatcaagggacaaaaacactgatgatattgcgtttcttttcttttctttcttggagatggagtctcactttgtcacccaggctaaagtgcagtggcatgatctcagctcactgtaacctctgcctcctgagttcaagtgattctcctgcctcagcctcccgagtagctgggactacagatgtgtgccaccaagcccagctaattttgtatttttattacagatgagttttcaccatgttggccaggctggtcttgaactcctgacctcaggtgatctgcccaccttggcctcccaaaatgctgggattataggtgtgagccactgctcccagcccaagattgtgtttcttaaaagaacatcctggccaggctcaagcctgtaatcccagcactttgggaggccgaggcaggtggatcacgaggtcaggagttcaagaccagcctggccaacatggtgaaaccccatctctactaaaaatataagaactctccaggcgtggtggcgggtgtctaatcccagctactcaggaggctgaggcaggagaattgcttgaacccaggaggcagaggttgcagtgagccaagatcacgccactgccgttcagccttggtgacagagtgagactccatctcaaaaaaaaaaaaaaaaaaaaaaagaatattctgccaggtgtggtggctcacacctgtaatctcagcactttgggaggccggctcacgcctgtaatctcagcactttgggaggccgaggtgggcggatcacaaggttaggagattgagaccatcctgactaacatggtaaaaccccatctctactaaaaatacaaaaaattagccagatgtggtggcacatgcctgtagtcccagctactcaggaggctgaggcaggagaatcacttgaacccaggaggccactacactccagcctgggcagcagagtgagactttgtctcaaaaggaaaaagaaataaaaacatcctgccgctcattacaattgtaacctcaaaatagagcccactggtgaggtcctgaatctcatatgcagatgcagtccacagttggaattgtgactgtgatatgcaaacatcgagccaggaatgtctcatttctaaagctacaaatgatgactcacttctaaatgtagttcataggcagatgaggactctcctatattgatcagccaattggagagatgttgactctcatttctgggattagagcagcatgtactatcaagggtccataccatcacaaatgtcttagagtggattgcgactcacatgcatattgcataaagtcctcaggtaatgcattgaatgcccttacatggcccagcacacaggtgacattgtgatgctggttttcacaaccagtcaacagtaaatatgtcatccttttagaaaaacacaacctacttctgaagttctgaatctcaaccctggaggcagtgggaagttgcaaagttgactcccatgtgtggatctgctccacagctgggctggtgactcagaccaagattcagtgcacctgtgaggctatgattttactgagaagacagagtctaaaggagagattgaggctctttttcatgaattcatccatattgagattgtgatttctgcacttagacccaacctccaaatggtcttgcctctcatacctagaatgggaatatgtgaggaattattcatgttattcctgagcctttctgcatgtgtgattgtgacacacatctctgctcaaaacctgaggaatttgactctcctgcctgggcctggcacacagatgggattgggacatattgtttgaagcagtatttagatgatgtgaccctatactctttccttgttcctgtcacagagtacattgtgacatatcactggtccctgcacccaggtaatttgtttgtcttttttatgccctgcccacatgggctattgtaacatattgctgggtctaacacccaggtaatatgaatctcctacctatatcctgactacaggggccaattttgccatatttctgaacccgtcatctatttgatgttactctccactttttttttcttggttttaaggagtggagagtttaataggcaagaaggaagggagaagacagaaagaagaagctcccctatgcagagacagagggaggggagctccaaagccaaaagagaaggccccctactctcgacttttacataggcttttccctaagagacattgtaacatatctgggccaagcacctacgtgatgttactctttgctccttcctgggccctgaccaagaagggggagtgactaatccctaggcacagcacacaggtgatgtaatatttctgcctgttccctgtccacaggagacatagtgaatgtccctggcctactaaacaagatgatatgactattttttgtctctgagacctgtcaacagtggggattgtgacagatcacttgtctcagcacctacataatttttccccatgcctgggtgcttcccactggggtgattgtggcgtataactaggtgaagggcctaggttatgcgacttttctcttctacgtgagcctcacccacatagggcattttgacatacctctgaagctctaatttaggtagactgctgcatggacccttcatttttcaggaagtattgtgccatatttttttgacctagctataatgcttctaatgccactgcactccagcctgggtgacagagtgagactacatctcttctaatgcttgggctctgcccaaggagggattgtgatgtattgctgggcccagcaccttggtgatgtgactctcctctgcttctacagggttcaggacggaaaggagagttacatcacttaggtgatgaacaaaatgatatgtcataattcccctattagcagggctcatgcaggagagtcacatcacctaggtgttggactcagccatatttcaatatgcaaattgtatattgtgtttattaaaaattgtatatattgaaatatggctgggtccaacaggtagatggtgtgattctcctgcttgagcccttctaatagggaaattatgacataatcattttgtttataacctaagtgatgtaactgtccttttctacttgagctctgtataaaggggggattgtgacatatcactggacccagcatctggtggtaccagtctctttctgtttttctttttcattttttttttttcttctgagatgtagtctcgctctgtcacccaggctggagtgcagtggcatgatctcggctcactgcaacagccacctcctgggttcaagcaattctcctgcctcagcctcccgagtagctggggttagaggcatgcaccaccacacctggctaatttttgtatttttcgtagagatggggtttcgccatgttggccaggctggtctcgaactcctgacctcaagcgatctacctgcctccgcctcccaaagtgctgatattacaggtgtgagccactgtgccacgccttattaccctcctcatcagccctgtgtattttgggtattaagacatatttctgggtcaaaccaaatgggtgaaaggctcttgcctgggccctgcccacaagaggccttgtgacacatctctgcatccactgctttggaggtgtgactctcctcttccatctgcaccatgaccacacagaaaattgtgacatacctctgggttcagcaaccaggtgtgtacccaggtcttacctgcagagaaaactgtgacatataacttggcccagtatccaagtaatgtgactttgttgtctgtgccttgctttcaggagagaattgtaacataaccctggtcaggcaaccaggtgatatgactctctgtctgatccctaccctggaaaaattgtgacatatttctgacccagcacccaggtgatgttactctcctgttttctttctactcacagtttgggttgtgacatataccttagccaagctcacagttgtggtgatgacactaataccacaaaccagccaaaaggagagttactggcacttgtaactatacttggagaaatgggtaaattcctgggtcttctctagataatgtcataaaggattacttttctttcacattttatataaagtctttggatggtacagagagtgtcatcacaagaccaagcacacaggtgagactgtgtttctcatatgcacaacctaccaaatgttagcattgtcaccctgacccatggacagtgcccactggagagatcctgaatttcacaggtgcatgcagtccacagtaaaaattctgttacatgtgatcatgccactacagttaacatggtgactaatttcaaaatccagctcataggcaggtgaagagtctcttcttgggacccagccatttggagagatgttgactcaaatacatggacttaggttcacaggtatgattatgaatccataccaggaagaaagtttcagagaaaattgtgactttcatgaatactgtataaagacctcagatggtacagagagttttataatgaggcccagaacacaggtgacattgtgacacatgcacacccagccgacagtaaagattgtcatctttccacatgaatacagctcactgttgaagttctgattctcatatttggaggtagccaaaagctggaaaattgactctcatacatggatttgggctatatgtgggttgatgactctcagaccaagattcaacataccgctgaggctgtgactccactaaggggacacagtccacagcatagattgaggctcttatgcatgtattcagtccacctttgagattgtaactgatgtactcagactcaacatacaaaaagtgttgactctaatacctagaaatgggacatgtgcaggattgttaattttatccctacattttcctgcaactgtattgcaacatacacctctgaccagcacctgagtaatttgattctcctccctggtgcccagcccacagattagatcatgacacatcactagacccaacacctaggtggtgtgactacatttgcctcagcactgcccacagggaggcattgagacatatggctgagccccacaccttggttatgtgactctcattcctgtgccctgccattatgggtcattgtgacatattgctatgtgcagcatccaggtgatgtaactctctttgctgggttctgcctaaaggaagcattacaacctatctctgtaccaatcaccaaggtaatgtgactctcttattctaccaggtccctgcacacataaataattttttctattactgggcccagcatcgagctgaagtgactcttctcttctaagtaggttctgctctcaatgtagattgtgacatactgctgggctaaacaaggtgatgtgagccttctgtccaaaccctgcccatagcaagcacagtgacatatctgtgaatccatcatctttgtgctgtgactcttacttgggtttggcctataggagagattgtgacatatctctgggaccagcacttagatgatgtgactattctttcttcccatggccatgcttccatgaaagagcgtgacttatccctgggataagcacacaggctacgtcattcttctatctggcccctgtccacagggattattgtggcatatctctgggcccattacctagatgatgtgactctactcttctttctggggcctgtccacagtgaggattgtgatgtatcacttggcccagcacttatgtgatgtgactcttctcatgctttggctctgcccactggagtgattgtgatatgtagctgggtccagctcttaggttatgcaatctatcttttctctgtgagccctacccacagggggcattgtgacatatctctgagcctctcacttagatgatgtgaattttctgctagggctgttttcccagagggtattgtgacatttctgggcccagaacctaaatgatgtgactcttctatggcttgggctctgcccaaaatatgactcatttttgtgactgatctctgcatacatgtattgtgatgtatggctggaaccagcacctgcataatatgagtcttctgcatggactcttttcaggagggtattatgaaatatcattttgtttatcacttaggtgttgtgactctcttcttatgactggaacctgccacaaagggcaattgcaacatatcacttgacccagcacctaagtgatgtgattctctttttttgggggagggggtctcacatattttgagtattgctgggcccaacacctagggaacagactgctcctttcttgaccctgcccatgggggctttgtgacatatctctatcaggggaaccagcacccaatatttcaatgtaggttcttttctgttttccctaagtgttggccagtctgagaaataaagagaaagagtacaaaagaaataaattttacagctgggtctccggggtgacatcacatgtcagcaggttccacgatgcccccgagccgcaaaaccagcaagtttttattagcgattttcgaaggggagggagtgtacgaatagggtgtgggtcacagagatcacatgcttcaaaggcgataaaatatcacaaggcaaatgggggcagagcaagatcacaaggccagggtgaaattagaattactaatgaggttccatgtcccgctgtgcatgcattgtcattgataaacatcttaacaggaaacagagttcaaaagcagagaactggtctgactagaattcaccaggctgtaatttcctaatcctagcaagcctgggggcgctgcaggagaccagggtgtattttatcccttatcttcaactgcataagacagacactcccagagtggttattttagaggcctcaccctgggagtgcattattttgccaggcctgttccttgctgagaaaaagaattcagtgatatttctcctattcacttttgcaaaaagagaagtatgactctgttctgcccagccctacaggcagtcagggttatctcccttgttccctgaaaatcactgttattgtgttcttttaggatgcccagagttcatattgttcaaacacacatgttttacaaacaatttgtacagataatgcaatcatcacagggtcttgaggtgacatacgtcctcagtttatgaagatgacaggattaagagattaaagacaggcataggaaattataagaatattgattggggaagtgataagtgtccatgaaatcttcacaatttctgttcagagattgcagtaaagacaggcacaagaaattataaaagtatgaatttggggaactaataaatgtccatgaaatcttcacaatttatattctgctgcggcttcagccagtccctccgtttggggtccctgacttcctgcaacatatctctgcatccatgacctaaatatgtgactcctctattctggctgcacccagcttacaggaagattatgacattttgctaagtaaagtgtatcttgtgctgatctcctatgttattctgtgactaagaatgcctaacctggggttgcagcccagtaggtctcagcctcgtttcacctcaacactattcaagatggagtcgctctggtttgaatgcctctgacatagagatccattgtaaaattatgaaaaaaatttatttgaattgcagtgaataagaaatggaagacctaggatgggctattctgaaagatttagcaatatttgtatttgtcaaaatttaagttttccgttaatacttctgaatagatacattgttttattctgtcaagtttaaatagatacgcttgataatacaaggagttcccactgtgaaagaaaaataaatctcctgatgccaaaattactaatccaatagaaaagtcaagctggagactacatcaggcaaacctgtttcctattttattcttaaataagatagctacacagataaaaagctacatacctacctcacaatttgctcagaaggaaattcctagtgaatagatgacagacagaactcaaagttatctctctgaggctcacctgagacaaatgcagatctgtttgtttcctctgccctattgttaattttaaaatgcagattcactgagccaggctaaattgtgtattcagtgggagacttatcaaggactcaaataaatttattattttttctcttatctacttatgacttggaagccccaacctcaagttttcctgtcttacctgaccacaccaatgtacatcttaaacatgttattgatgtctcttgactttctaaaatgtattagaagactgtaccccaaccaccttgggcacctgtcatcaggacctcctgaggctgtgtcacaggctcctacttaaccttggcagaataaactttccaaatttattgacacttgtctcaggtaccttttgttttacacagccaaggcactgctagctggtcactactgcaccccagacttatccaccaccattgcagggactctggtttcttgatagcaattgtttcacttcaatggaagatggacaggtgtgtacctgagaatgcagcactgagctcctgggtgatgtgggatgttccaagcatcagctttcagccagtctatcttataactgttgaaagttacttagtgtagtgtgaagatgggaataaacagctcctgaatgctaacaatggctgttcattatagggtgacccaaggtggccatgccatggttctgggttcttctgtggcttctcagtggctgatggagtggtttttttggtcttgtgatacagggtgtgtgtgtctaaaggagtggagggcagggtggggaaaggaggtgacaggcaggttcctggaggtcacctcctggcattattcttgtggattgccaagtttcttgtttgaatttgtttcttgttaatagtacatgtgtcctcagcaaggaggtgaaaataaaaaaaaagagcttggaacagtctcagctctgtgaggtctgcacaatttatcaagcccagagagatgagactgtggaacttcacccaggggcattttttgttgttgttgttgtttgttttgagacgaagtctcactctgtcacccaggctggagtgcagtggcatgatcttggcatgctgcaaccctgcctcttgagttcaagtgattctcctgcttcagcctcccacatagttggaattacaggcacatgccaccacacacggctgatttttgtatttttagtagagatcgggtttcaccatgttggccaggctggtctccaactgctgatctcacctgatttgcccacttcggcctcccaaagtgctgggattaggggcaattctttaaagacatttactttctgactagcagtctcacccattatttctttattaggaatttggaaaataaaagaatatatgcagccaatcaatagcttatgcatttaaatatgaattcttggtaaataacttaggaactgccttctcactttttcaaaaagactcactttcaatggctgctaattaaaatatatattcagggcaacttaaatctgtcctcctcttggctatcctcaatatctgacattgagtaaatgtatttcaggttacattttaaccttttttattattttaagttgactgagggctggcctggaacattctccttggtataaatactccaactataagctacctgctcagtagaggaaactaatcaacagcagggcctagcataggtcaaagacacaagcagtgggaagctttttggggcctggctcctaattgcaaggacagttgcacaggtgtctctgaatgcttagacagcctggcctttcctgacccaatgccccccatcagctttttcaagcacatcttgatcttttgtcattctgttctctggggtgaaaactcatcgtcagggctgtctacaacaaaacagaagtatcaggttactaaaacctcaggaacagagattacggattgggttaagagtgtgccctttcttaaggatggtacgcatggaaaagcagcaagcagtttcagaaagatacaggaaaaattgcctctaacggatatttatacttcaactcaatttattctgtaagtggtagggaaaatgggataaaataccatatgttcaagcatttttgcttctcagtcagaatgaaaccctgcagcaggcatgtccatgtttcatgagagaaatagaagaaaaagagttggacatacaagatgatccttatttcaagcccccctgccacttggttcagcgggcatttttgggtgaagcagaacctttctgtcaggtctgaaggttcagatgtgttggtcttttttcccactaatacacctgaaagttctattgagaaccatttgtccctcctccctacccttctagtcccactctgtacccaccactccctgaagaacttagcccagtgagtactactcatagtggagctgcctatcaacctccaaggggaaatctttgtccacctacagaggttgcaaatggggaagaaggcctgtgagaggaggtgtccccttttctctgtctggtttggctctataataagacaagtttggtcatttctctgaagatgcaggaaaattcataggtgagtttgagaagttaactctgacctacagtttaacatggcaggatctgtacattttgttgtctctgtgttatacagtggaagaaaaacaatgcattttggggacagctaggactcatgcagatgaggtattggcttgcaacccgaaccataatatatatcagacaggaggtatagcagttccagatcaagatctagagtggaactatcaaagggggtgtgaggacttggaagaagagatcatatggtcacttgtttgttgaaagagatgaagaaatgtatgaaaaaacctgttaacaatgaaaaggttaagcaactttctcagggcaaagatgacaatccagctttgttttaatagtgtttagttgaggcaatcagaaaatatactaacactgatcttgcctcaatgaaaagatagacccttctgggagtacattttataacccagtctgcccctgatatccatagaaaactactaaaagcagctatgggtccccaaacttctctggaacagctttggatatggcatttttagtttttaataacagggacaaagcggaggtagcggaaagaggaagaaggacctcccacaagttgcaggtcttggttgcaaccttaagctaacctcccacatggggttgccctcctgggtcttgggttgaacaagggaagctgaaaggtgggaagcctaaacctgggtgtccgagtcactgtgccttgggcataaatcaggttgcacactgtaagaaaactgaccactggaagagggtttgtccagtgttctgaagagagccatcagcacgtgaactaatgatgggtaaaacagccaggcaagcacccaagagtgacggggactgagaccttccaccacggtttccatcagacaactagccatatatctggaaaagcctcagtattttttgccatggcagttaagaatatgaagtttcaccaggtgcggtggctcacacctgtaatcctagcactttggaaggccgaggtgggtggatgacttgaggtcaggagttcaagactagtctggccaacatggtgaaaccccatctctactaaaaatacaaaaaattagccagaaattgcttgaacctgagaggcggaggttgcagtgagctgagatcgtgccactgcactccagcctgggaaacagagactccgtctcaaaaaaaaaaaaaaaaaaaggaagctagatgagttgcgagttgcctcatgcctgtaatcccagcactttgggaggctgaggtgggtggtcgggagttcgagaccagcctgagcaacaaggagaaaccccatctctagtaaaaatacaaaattagctgggcgtggtggcacatgcttgtaatcccagctactcaggaggcttaggcaagagattcacataaacccgggaggccgaagttgcagtgagctgagatcatgccactgcactccagcctgggcgacagagtgagactccttctcaaaaaaaaaaaaaaaagaatattaactttcttctggactgcttactctgttttgacccattataatgggtctgtttcacccccaaactgtatggtcacggggatagattgacaagcccatagatgccattttacataatctctaagctgtttttcagtgacttcggttttcttacataacttccttatcatgcccggatgcctcagggaagtcgtagcaatttctctttcagtagataaagccaataaactggctttagaacaacattctgaggtttaagcccacaccaagtatgaggagttctataagccaaaagacaccagtggatgacaggggacacttattgaaatagcagacattttgctagacactccaattaacctgatatgaggtgctaatcaataaaaaatagttaaacatttgcatgactctactcatttgggaataaattccctgtttaatatctcggctttttatagaaaaataattacttaaaagagtaaaccaggtaacccaggcctgtgaactatatgcctggaacaacccaaatgaccaatgtttacctcctcctttagtaaggcctgttcagcatagaggagcataccctggtgaagactggcaaatagactatactcagatgcccccgtgtaaagggtttaaatattgattagtattcattgacacctttaccgtttggattgaggcttttcctaccaagtctgaaaaggcaatcaaggtttctaaactactaaaagaaataattccgatgggtacagtatctcacgcctgtaatccctgcacattgggaggccaaggcaggtggatcacctgaggtcaggagttcgagaccagcctggctaacatggcgaaaccccgtctctactaaaaatacaaaaattagctgggtgtggtggtgtgcacctgtagtcctagctactctggaggatgaggcatgagaatcacttgaaccttggaggcagaggttgcagtgaaccaagattgtgccattgcactccagcctgggcaacaagagtgaaactctgcctcaaaagaaaaaaaaaaaaagataatatcgagtctcgcaaaatatagtaattaagaagattctttatcacaaacccttgtggcagagcacatctcctcataggtaaaaacattgtaactatggtaaatgtgttcctcaatagtaaattaattattaaacttattcaaaattattttatttaatttttcagaacaatgcttatgttttgtatagctaattgctgtaattctttaacaaaaactgggccagacacagtgggtcatgcctgtaatcccagcactttgggaggccgaggcgggcggatcacgaggtcaggagatcgagaccgtcctggctaacacggtgcaaccccatctatactaaaaaaaaaaaaaaaaaattagccaggcgtggtggcgggtgcctgtagtcccagctacttgggaggctgaggcagaagaatctcttgaacctgggaggcggaggttgcagtgagcccagatcgcgccaatgcactccagtctgggcaacagagtgagattccatctcaaaaaaacaaaaaaaaaaaacccaaaaaactatttgattgatgtctcattacaaaatgtataaaagcaagctttgccccgaccaccttgggcacatgttctcagaacctcctgagagctgtgtcacaggccattgtcactcatatatggctcagaatcaatctcttcaatttttttttaaaccatctgtgacaaacccacagcaaacattaaactgaacaggaaaaagttggaaacattttctctgagaaatggaacaagacaatagtgcccattttcatcacttctattcaacatagtacttggaagtcccagccagagcaattagagaaaagaaataagtagcgagcctccaagttggtaaagaggtagtcaaattgtcactgttcactgatgttacaatcatataattaggaaaccctaaatactcataaaaaagcatctagatctgatcaattcagtaaagttttaggatacaaaattaatgtgcacatattagtggcattggtatacaccaacagtgaccaaactgatatttaaatcaagaactcaaccccttttaaagcagctgcaaaaaaataatactaataattaggattatccctaatgaaggccatgaaagatctctacaagaaaaactgtaaaatatgtctgaaaggtatcatagatgacacatacaaataaaaacacatcccatgcttatagatgggtagggttagtattgtaaaaatcatattaccaaaagcaagctacaaattcaatacaattcctatgaaaataacatcataatttcctcacataactaaaaaactctaaaattcatatgaaacaaaaaagaacctgcatagacaaagcaagactaagcaaaacaaaaataaactcaagatggatcaaaaatgttaagacctgaaactataaaaattgtagaaggtaatactggaaaaactcttctagacattggctttggcaaagcgtagatgaccaagaacccaaaagcacatgcaacatgaaacaaagacagatgagacttaattaattctcaaaagaagatatacaaatggccaactaacgtagataaaaatgctcaacattactaatgattaatgatcaggaaaatgcaaatcaaaaccacaatgtgataccaccttattcctgcaaaaatgaccataattaaaacatcaaaaataatgcatgttcgcatggttttggtgaaaagggaatacttttacattgctggtgggaatgtatactagtacaacactatggaaaacagtatggagattcattaaaaaattaaaagtagaactaccgtttgattcagcaattccactactgggtatctacatggtgaaaaataagtcattatatgagtaagatacttgcacatgcatgtttatagcagcacaatttgcaattgcaaaagaatggaagcagcctaattaatgcccatcaactaatgagtggaaaaggaaaatgtggcatataccacattttctttatatatatataatatatataaataatatataatatatttataataatatatatacaccaatgaatgctactcaatcataacaaggaataaaataatagcacttgcagcaacctcaatggagttgaagaacattattctaagtgaagtaactaaaaaatgaaaaaaacaaatattgtatgttctcacttataagtgggaactaagctatgagaatgcaatggcataagaattatataatggactgtgggtactcagtggcaagggtaggagaagagtgacggataaaagactacatattgggtacagtgcacactgcttgggagatgggtgctcctaaatattagaaatcactacaaaagaacttatccatgtatccaaacatcttctgtaccttaaaaactttggaaataataataataataataaacaaaaaataatcccaaaccccgtaagtttaactttctatgctttggctgtttttggtttattttttattttttagaaagggtctcactctgtcacccagaatagagtgcagtggcttaatcagggctcattgcagcctcgacctccttggttcaggcaatcctcctccctccgcctcctgaacagctggtactaaaggtacaggccaccatgctcagttaacttttgtatttttttagatacatgtttttgccatgttgcccaggctgatctcaaattcctgggcttaagcagtcttcatttcttggcctcccaaagtgctgggattataaacatgagccatcatgagtgaccacaatcttttttttttttttttttgagacagagcctcactctgtcacccaggctggagtgcagtgacctgatcttggctcacttcaacctcctcctgtcaggttcaagcgattctcctgcctcagcctctgagtagctgggactacaggcacgcgccaccacgcccagctaatttttgtatttaatagtggagatgggggtttcaccatattggccaggctggtcttgaactcctgacctcgtgatccacccacctcggcctcccaaagtgctgggactacaggcgtgagccactgcacccagcccagaattttttttaacatgatatagaaaagctaactatatttagatctgttacttaacagaaaatttgaataaacgtcttttattaaaaaacataaaattttttatctacaaatattgatacaaaacagttcaaaattacttcctaggggtttcactaaaaattagtttgttaagggtatatatatatatatataaaaactaagatttctaggtgtaaaacaatttttttatagagagtgtataaacaaaggccaggcgcagtgggtcacgtctgtaatcccaacacccaacactttgggaggccaaggcaggtggatcatttcgagcttaggagtttgagaccagcctgaacagcaaggcaaattccagtccctacttaaaatacagaaataaaccgggcatgatggcttacacctgtagtcccagctactccagaggctgaggctggagaatcgcttgaacttgggaggcggaggttgcagtgagccaagattgcgccactgcacttcagcctgggcgaaagagcaagcctctcctggaaataaaaaaacagtgtataaacaaaagcaaaatatgcttttgatgaagaaagttagaaacattttgtctactttgaaattatttaaaggttgtttcaaattgaaaatataaaaataatgtagattaaaatacaacataaaaatttaaaaaatggccaggcacgatggctcacgcctgtaatcccagtaatttgggaggctgaggcgggtggattacctgaggccaagagttcgtgaccagcctggcaacatagtgaaaccccgtctctactaaaaatgcaaaaaattagccaggtttggtgatgcacgcctgtaatcccagctactcgggaggctgaggcaggagaatcgcttgaacccaggaggcagaggttgcagttagccaagatggcgccactgtactccagcttgggcgacagagctagacttcgtctagacaaaaaataaaaaataaaaaaaagtataagagatcataaaatatgtataaaaatctagaatggtcaaaaagacaaatttgatggactttatttttgttattttattttattttttgagacaaagtctcgctctgtcgcccaggctagggtgcagtggcaggatcttgactcactgcaacctcagccccccgggttcaaggaattctgctgcctcagccacccgagaagctggggttataggcgtgcgccaccatgcccagctaatttttttttcttttatttttttgagacggaattttactcttgttgtccaggctggagtgtaatgacgcgatccacgctcactgcagcctccacctcccaggttcaagcagttctcctgcctcagcctcccgagaagctggtattacaggcacgtgccactacgcccagctaattttgtatttttagtagagatgaggtttcaccatgatagtcaggctggtctccaacacatgacctaatgtgatccgcccgccttggccatcgaaagtgctgggattacaggcgtgagccaccgcgcccagctgatggatttacttataacggtttatcaaattagctttagtgctgataatacattattactaaagtaaaagttgattttctcttgaacaaaaattatatgtattattaatatacataaaatatgtttgttcacattttgaatacattgaaaaagagagagagcaaaaaagatatagaattttcccatgctctggggtgggcctggctcagctcagggaggaagccctgcccgataaggctgcagcttaggctgtcactctttcttcagcctagggtgtgatcacatcttctatcactcagggtctgagtaggcggggccttaaacgttatccaactagggacgttgggctgggaactgtccaatcaggcacacagctggactggacaaagcggcttccgggatatggcggggcctttgtctctcgctgtcgccggagtcccaggtctgtcttcactgctctgtgtcctctgctcctagaggcccagcctctgtggcgctgttaccagcaggtattggagatccacagctaagatgccaggaccccctagaagcctagaaatggtgagaatgccagtccgacatcccgagagaggggagggggctggttggaactggtgggaagcggctgtggcgggactcaggcctccccccagtcagctccacaatctgcgcccagctcgacctcagtccccttcagaaataagatggcggctgcgctgacagccagacccccaggagtcctgtttcttccctgcgcagtgactgtgccctgtcctggagccctctctgggcagctgtggacccgcagccccgcgtctctcccagattgttcagggacccggggagggtcgtcaggggagaatcctgactcgggttgcgggttcatgaacgggaagagctttggtctgtggggttcccaggccctcttttttcccattaaaaatttatgggcgtcactgcaaaaatattaaatactttaataaaagaatgattcaaaaattgtaccacacccagctgtggtttgtacttttgtggtccatggaaggggcctgaagaaaagattgttacaaggttcatgataaagaaaaccaaattcaataattggctaggtacagcaatctaggttgtcgttttttttttttttttttcttttttttgagacagagtctcacttttttgctcaggctggagtgcagtggtgtgatctcgactcactgcaacctccgcctcttgggttcaagcgattctcctgcctcagcctccctagtagctgggactacaggcgcccgccaccacaatttttttatttttagtagagacggggttttaccatgttggccaggctggtctccaactcctgacctcaggtgatccacccaccttggcctccgaaagtgctaggattacaggcgtgagccaccgtgcccagcctcgtttcttaatttttacatttaaggtgggaatatcctggttatgtaatcagagcttaattgtcagcttattcttggttaagcaagaattttgtttccgctaatgtagtaatttaccaaaaaatgctcttgagtttagattttttttttagaagtagaaatccggggactagagccacctcaatctaattgcctgccacttaattattttcacactccacaggggactgcttttttcctgaaattttcacatgtatcccaagcagggcctcaagtccacccctcatcccctattcctccagcctaactctggcttgcaggaaaatactaaatttcccgttttgtctgacattcccaaatgccaatgtcccctccctaattcactttatcatctatttgtcctttagggtagattttgatacctgttttaatttttatttatttatttattttaatttttgagacagaggcttgctcggtcaccccggatggagtgcagtggtgcagtggtgtgatttaggctcactgcaacctctgccttatgggatcaaatgattctcttgtctcagtcgcccaagtagctggaattataggcgcccgcccccacgcctggctaatttttgtatttttagtagagaccgggcttcactatgttgtccaggctggtttcaaactcctagcctcaagcgatccgcctgcatcagcctccccaagagctggtattacagacgtgagccatctcgcctggccaattaatctttttttttttttttttttttttttttttgagacagagtttcactcttgttgcccaggctggagtgcaatggcacgatctcggctcaccgcaacctccgcctcccaggtttaagcgattctcctgcctcagcctccctagtaactgggattataggcatgtgccaccatgcctggctaattttgtgtttttagtaaagacagggtttctccatgttggtcaggctggtctcaaactcccgacctcgggtgatacgcccgccttggcctccgaaagtgctgggattacaggcgtgagccactgcacccggccaattaatcattttttgacaaagcatttgatggcacatttaaaaaggtttgttttctttttgtaaatatttcctatgagaagaaagcaaagaataatctcctgacactgtattgtaaaatatctctgcgtttttttttcttctatcttccctagtcacagatatcttatcagaatgtttttgggtcaagttttccttttggaaactatagtgtgatgtgtcttcagtcaccattcggttttcttggacctgggtttcagtactgtattgggataaacgaagatacccaccatggctatgtctgcttagagtgtctagtaaatatcagcttctgggtcatattctctcataggaaaatctgaggtattgagtgtagcgtcccaagtgcgcaggtggatgccctgagtctaaaaggcatttcctagtgcacttttttttttaaagctaattttatgagacattaatattgtcttcacccaacccagctttcatttcttaaagacacattgctggtcagtcaatcagataccagtattgaggagaaaacaaataatttctgcctcctggtttcctttagagaacagaaaaatagtaaaaaatttctagaaaacaaaacaaaacaaaacaaaaacgagggccaggcatggtggctcatgcctgtaatccctacactttgggaggccaaggagggtggatcacgaagtcaggagttcgagaccagctggccaacatggtgaaaccccatctctactaaaaatacgaaaaaaaaaaaaaaaaagctgggtgtagtggtacaggcctgtaatcgcagctactcaggaggctaaggcaggagaatcagttgaacctcagaggcggaggttgcagtgagtggatatcacgccactgcactccagcctgggcgacagagtgagactccatttcaaaaacaaaaacaaaccgcaaaaaactgaccccagtgagatggtgtaagaacttgcagagtaaaatgcgcctgagacactcactggggcatagttcagagtctcctgagagggggttattgagcactttagtgagtaggatggggtgggacagtctctcaagtaattggatggcctgacttgacacatgattaagacatatctgtgtcttgaaaaggttttttcacttattttgacctaaggcttgttttcgttgtcttgagacagtttccctctgtcacccaggctggagcgcagtggtaccatctcggtccactgcaacctccagatcttgagttcaggtgattctcatgcctcagcctcccaagtagctgggactacaggtgtgcaccaccacactcagctagtttctgtagttttagtagagacagagtttcaccatgttagctaggctgttctcaaacttctggcctcaagtgactcacctgcctgagccttccaaagtgctgagattacaggcgtgagccattgtgcccagctcacctcggttttttaactgtgtattgcattttattagtagagcttgaaaggtaagaaaatatttgcaaagggcataaaagaggtgagtttcaaaaacattaatatctaataatatattttatttgttgaacattttcatttacctttttctttctcagagtgagtttaggaagtttctcggacatgtttttttttatggaggagtgatttttttttttttttttttttttgagacagagtctcactctgtcgcccaggctggagtgcagtggcgccactttggctcactgcaacttctgcctcccgggttcgagcaattctcctgcctcagcctcctgcgtagctgggatttcaggcacacaccaccacacctagctaatttttgtatttttagtagagacagggtttcaccatgttaggctggtcttgaactcctgacctcgggtgatccgcccgcctgggcctcccaaagtgctgggattacaggcatcaaccaccgtgcttggcctatggctgagtgatttcaaacagaattccatctagcttttagaatggtagctaccaaggaaaaaaataaagaaaaaaaaaaaaaaatctctcttcaatttcagctgtagacaatgaatacatttccacaaaacaatgtgatagataattgatgagttaaatagattcctgaaaacttcaattcctttttttagcagggtaaatccttggtagtgaacatctttgttctatatcctgtgtttttttgtgtgtttgattgttttttgagataaagagttgcactgcgacacccaggctggagtgcaatggtgcaatcttagctcactgcaacctccaattcccaggttcaagtgattctccttcctcagcctccggagtagctgagactgcaggcctgtgccaccacacctggctagtttttgtatttttagtagagatggggtttcaccatgttggccaggctggtctcgaactcctgacctcaagtgatctgcccacctcagcctcccatagtgctgggattacaggtgtgagccactgcgcccagccctatatcctgttattttgatttttgagtttaatgctaaattttatgtgatgaaacttggtacctcctagaagtgttcctatgtgattaattttttttttttttttgagatggagtctcgctctgttggccaagctggagtgcagaggcgcaatctcagctcactgcaagctctgtctcccgggttcacgccgttctcagcctctcgagcagctggaactacaggtgcccgctaccacgcccagctaattttttgtatttttagtagaaacaggatttcaccatgttggccaggatggtctcgatctcttgacctcgtgatccacccacctcggcctcccaaagtgctgggattacaggcatgagccactgtgcctggccttttttttttttttaaatggaattttgatgttgttgccctgagtggagtgcagtgggcgatctcggctcacctcaacctacacctcctgggttcaagcaattctcctgcttcagcctctcgaatagctgggattacaggcacccaccaccaccatgcccagctaatttttgtatttttagtagagatggggttttatcatgttggccaggctggtcttgaactcctgacctcaggtgatccaccctcccccccggcctcccaaagtgctgggattacaggtgtgagccatcacgctgggccaagcaatcctcttgtacctcagccttccacgtacctgggactacaggcatgcaccaccatacctaggtaatttttgtttttgtatttttttagagatgggatttttccatgttgctcaggctggtctcaaactcctgagctcaggcaatccacctgccttggcctctcagagtgctgggattacaggcatgagccattgtgcctgatcataccatattttctttattcagtctaccattgataggcattcaagtcgattccatgtctttgctattgtgaatagtgctgtagtgaacacccttgtgcatgtgtgtttatgacagaataatttatatttctttgggtatatacccaattattaggttgcttgatgaaatggtaattctgtttttagttctgtgagaaattgccacactgctttttacaatggttgaattaatgtacactttaacagcagtgtataagcgttcccttttctctgcaaccttgacatcatctatttttttgctttttaatagccgttctcactggcatgagattgtatctcgtggtttttctttgcatttctccaataattattgataggcattttattatatgtgtgttagccacatgtttgtcttcttttgaaaagcatctttttcaagttttttgtctgctttttagtgaggtcttttttttcttgtaaacttaagatttttatgaattctggacattagacctttgttagaagcatagtttgcaaatatttcctattattctgttggttctctgttttctgtgttgatagtttcctttgctgtgaagaagctctttagtttaattaggtccaatttgtcaatttttggtttttttgcagttgctttttgtatcttcaattatgaattctctgctagattctatgtctagaatgacatttcctaagttatcttccagggttttttataatgttaaaataaacatttcagtctttaatcttgagttgatttttgtatatggtgtaataaaggggtccagtttcaatcttctacatagtgcttgctagttattccaccaccatttattacatagggaattggttccacatttctattgtcacctttgttaaagatcagatggttgtaggtgagtgacattatttctggactgtctattctgttgcattggtctatgagtttgtttttgtaccagttccatgttgctttgtttactgcagctctgtagtataatttgaagacaggtaatgtaatgccttcagctttgctgtttttgcttgtgattaccttggctattcagactctttggttttatatgaattttacaataatttttttttttagttcttttaaaaatattttggtcatttgattagaatagcattaaatctgtaaattttggggggcagtatgatcatttttaggatattgatcttttctatttatgagcataaagttgttttccatttgtgccatttctgacttctttaagcattgttttgcaattcttatagagatctttcaccttcctggtattcgtagatattttattctttttgtggcagttgtgaagggattgtgtttatgattcgtatttggcttggatgttgttgatttacagggacgctactaatttttgtacacttactttgtatcctgaaatgatactgcagttgtttgtaagttaaagagcttttctatgaagactatatggttttccagatggagaattatgttgtctgcaaacagggatagtttgacttcctctcttcctgtttaaatgccttttatttatttttatttttatttttttgagatggagtcttgctcttcgcccaggctggagtgaagtggcagtcttggctcaccgcaaactccacctcccaggttcaagtgattctcttgcctcagcctcctgagtagctgggattacaggcatccgccactgcgcctggttaatttttgtatttttagtagaggtggggtttcaccatgttggccaggctggtctcgaacttctgatctcgtgagccacccaccttggcctcccaaagtgctgggattacaggcgtgagtcaccttacctggccaaatgccttttatttttatcttttgcctaattactctgacaagtacttccaattttatgttgaatagtagtgttgagagaaggcatctttgccttgtgccagtttccaaagaagaatgcttcgggttttttttttcttttctttttgagatagagtctcactttgtctcccaggctggagtgcagtggcacaatctcggcgctctgcagcctccaccttctgggttcaagtgattctctttgctcagcctctcaagtagctgggattacaggcacctgccatcacacctggctaatttttatatttttagtggagacagggttttgccatgttagccaggttgatctcaaaatcctgacctcaggggatccacctgccttggcctcccaagttgctggaattacaggcatgagccactgcacccgtccacttccaggttttgtccattcagtatgttggctgatggtttgtcatatagataacttattattttaaagtatgtaccttcaatggctaggttgttgagggtttttaacatgaaagatgttaaattttatcaaaagctttttctgcatctattgtggtaatcttgtggtttctgtctagttttgtttatatgatgaatcacatttattgatttgtgtatgttgaaccaaccttacattcccagaataaattctacttgatcatactgggttagctttttgatatgctgctggatttggtttgtcagtattttgttgaagatttttgcatcaatgttcaaaggtattggcctgaatttttttttgtttgttttatctttgccaggttttggtatcagaatagtgctgttcttatataatgagttgaaaacaagttactttttcttaattgcttaaaatagtttctgtagaaataataatcagcacttttttgtacatctgatagaattcagctgtgaatctgtctggtccttggctttgtttggttggtaggctatttattactaattcaatttttgagcttcttattcatctatttaggggtttcatttcttttttgttaattcttggaaggatgtatttgttcaatacctttttcattttttctagattgtcttgtttgtgtgcacagaggtgttcatagtacatttcaagatatttttgtggggtcagtggtaatgtctcttttgttatttctaattgtgtttatttgggtccttcttccttatctagttagtggtttatttattttttcatagatttaattcctggattttttgatattttgtaaagtttttatgtctaaatctcagtttagttctgattttggttatttcttgtctgctgctagcttagggattgattttctcttgcttctttcattcttttattgattatatcaggttgtaaaatgaagatctttctaactttttaatttgagcattaaatgctataaatttccctttaacattatcttagctatattgcagagattctgatgtgttgttttttagttcttttttttttttttttttaagatggagttttactcttgttgtccaggctgaatgcaatggcacagtctcaactcacagcaacctccgcctcttgggttcaagcattctccttcctcagcctttcaagtagttgggattacaggcatgtgccaccatgcctgcctaatttttgtaattttagtagagacaggatttcaccatgttggccaggctggtctcaaactcctgacctcatgtgatctgcctgcctcagcctcccaaagtgctgggattacaggtatgagccaccatgcctggcctgttttttttgttcttatttgtttaaaataacttcttggtttctgccttaatttcattatttaccaaaaagttattcaagtgcaggttgtttaatttttatgtaattgtatcagttgttttatttttattgaactatatttctgttcagctgtggtctatgtgtttgttctgtataattttgagttttttgaatttgctgaggattattctatttctgattgtgtggtcagtttttgagtatgtgccacatggtgatgagaacaatgtatgttatgttatttttagatgaagacttctgtagatgtctattaggactatttggtcaagtgtagactttaggtcctaatgttttgttaattggcttcttcagttatctgtttgttagtgcctgtgggatgttgtagtctcccactgttattgtgtcataatttaaaactcttatagatctctaagaacttgctttattcatgtgaacccatgaattttatacaacacctttctctcttctgctttttctcccataagcattcttacgtgtgcacacagtgtgcaaaattcagatgtccaagagttcaagcacatgtgatggacctgtctgttgtaaaacaaaatataaattaaaaataagaggcttggtccacattaagataagagaaaatatcttactaaaatctcttttcttaaaacatttagattgtgtgtagatttttatccctgtttttttgagatatatgtaaatcatattaacagcaaaataaaacttttgtcattttttttgactcaggattgtctttatctgggacctgagattaattgctctttttttgctttggcaagagattattcttatgatagtcttttaaagttgacacagatttgttcagagtaaagctcattccaagagcacacaaaagttgagcataaaaatagacaaaatttagcagtacagaattataaagattaaaagatactgagtaagttgtttgacagaaacctgattatccatggtgatcgtttgcaggctgaattataaagattaaaagatactgagtaagttgtttgacagaaacctgattatccatggtgatcgtttgcaggctgaagtatttatactacaaaaacaaaaagagttcagtttatggccggacgtggtggctcatgcctgtaatcccaggattttgggaggttgaggtgggcagatcacctgaggttgggagttcgagaccatcctgaccaacatggagaaaccccatctctattaaaaatacaaaattagaagggtgtggtggtgcatgcctgtaatcccaggtatttgggaggctgaggcaggatagttgcttgaacctgggaggcggaggttgtggtaagctgagatcatgtcattgcactccaccctgggcaacaaaagcaaaactctatctcaaaaataaaataaaataaaataaaataaaataaaataaaataaaatatacaagcaaacaacaacaaaaaaaacaattcagtttataaactgaaccagtggagtctgttgtcataccttggtttctatttattacttcagtacaattagcatagttatgcagtgtttgtagacaacctcattcaaacacattcactagtattttctacaatagtatgaataaagccataatatttactttaaatgaattccttaaatagctattttaatattgtgattcatacttttgaaatgtagtttttgagctgaattataaagaaaatgtttaaaaattccacatacattatgagtagtacattaaaattattcatacttacatatttatgtctaatatccaaagaaaatttactaccaaattgttacagtagatgttagtctgataggcttattaatttaaccaatagggataattataagtaagcataatgttagtgtctttcatttcacaaattggaatgctgctattacaggacaaataaaggcaagtgatgtggccatcccaaaactgtaatacctctctagtaagctatgttgtaggctcgcatatattccattatattatcacagtcatattttaattttttatcaaaggtactggtgtaagttgtcaaatatatttcaatatagattttgccttcaatggctagatgagcgcagcagagatgaataaaaacttttaaaattccaatgataatatgccccctttcttcatagtactcatgttactcatgctgagagtagctatgcactttgggtatttagagagaaattctttttagaggaatattttctgactgacttgagcaatcttatatctaatctcaggttttttaaagaggcttttaacttccttttttctcaatataatctttcttggagtgagagctgtttttcttttgaatgctttgtatatctgttttagaagccctattggtatcccataatatctctgaaagacaggctattacagtgagaactcttggagctagctttatctggatgcatgctggaaatccagcagtatttttttcatgtaaccattataaatagaaactgtggcttaaacaatgctctctttaccattattgtgaaggtgcaattctacccaagaggcctgcaggctcttcttctgcagctcaggcttcgctcttttttttttttttttttttttttttttgagacagtcttgccctgtctcccaggctggagtgcagtgacacgatctcagctcactgcaacctctgcctcctgggttgaagcaattcttctgcctcagcctccgagtagctgaaattacaggtgccctccaccatgcccagctattttttttttttttcttgtatttttagtagagatggggtttcaccatgttggccaggctggtctcgaactcctgacctcatgatccaccagcctcagcctcccaaagtgctaggataacaggcatgagccaccctgcctggccaggcttcactctttgatgtgacactaaagtgctgctgtgggaattggcattcacctaagatgtgagctgccagctgtgagccctgcgctatgggctgtatgtcagtggcaggtggtacgaaacagaagaggacactggccaccagaagaggggaagcaagagtgcgctagcacagtcttcagggagtagagagccactgatttaaaatgcaagtagccaaaaagacagcacccttttcagtcacttttgtagaagagtgaaagtctaccttaagcagttacctggcttcaagttgcaaactaccttctgtcatgaagatgtgaaaagcttattttgtcattgaatataaccagttagcatacatggatggcctccccaatgaccaggtgaatttaggatgaactatggcatggtgctgtaaattcttctacttgtgaactaattatggtaactgtctttctgtcttttcagtctcttaagtagactgactgtaatacatgtgatattcagatttaagtgtgtaatgaaacaattttctgtctgttacattattgtggtttctctggggctgaagagaatttttaaaaaattatattttccaaacagtgtctagaattaccagacataatataaacacataaggtgccaaccaagctttattgtaaaggggactttccctcttagtcttccagtcaactcacaattatgctctaaagtgcatgctgtcacctaaatatgcaggcagaattgtgtctctgtctatttggtgtctatagtcctctatagtcacttctagaggggctagaccagatttctacaaactttatagggcagatattaatcattttacttcattccatgactcttttatcttcagaactgaaactgattcagagaccatggagcccagaaacctaatcagagtaacagtgtgcattgagtagacatggagacatgagaatctccacttcttttcccttctctcgctaaaatgctcacaattgcaggtaacaactgctgctactccacccatccgggacctaaatctgcagctctgaattctaaatctaggtcttgaaatttgaaaaaaaaaaaaaaaaaatccaaaacttttatttgaggaatgaaagtctttttacttataaaactcagagagacattaaaataaaagcacaattacatctttctcccttccttcaactatgtattcatctcttgacattgttcactattgccacaggtaggtgtaagttaaactaataatgtcacactggacactatattctatacccttacccttaatgtacagtcaatcaataattaaagttatttatttaaacaagaatttctgacaaagaagtttgtatgtctctctctctttttttttttttgccttcacaaatccacttgtaactgctgctaatcaaagtgcaaattccaggcatcttgaatatttcttctcaagttacaatacttaagcttggcccaaataaactgtctacttatattcatgttgtgtcagcttttttttttttttttttagatgtggttttgctcttgttgctcaggctggagtgcaatggcttgatcttggctcactgcaacctccgcctcccaagttcaagtgattctcctgcctcagctttctgagtagctgggattacaggcatgggccaccatgcccggctaattttgtatttttagtagagatagggtttcttcatgttggtcaggctggtctcgaactcccaacctcaggtgatccttcgacctcaggggatccgcctgccttggactcccaaagtgctggaattacaggcatgagccatggcacccagcccgtatcagcctttttttaggtaaaatattatttagaattttctagagcagcctctatgagtagatcttttgattgtactctacttgctgtaacagccagaaatgcagaatgatgtttatctagaatctgcaaataaggtctggcctctgcctggaatttataaaacagggtcctactttagattgagaatgtacagaaaaccaataggaggcattttctgcattgtgagatgtcaacatagacattttagatccctcctttgagagtgtggctctttgaccttttcacatcttgtgttttcacctgctacagttatgtgagaggctccaggtgtaaatagaatctgatggcagaatctcttaagtgtaaagaagcatcttaggagtgagagatcaaggccacaaagtagccagagctctgagcacaagtatacttacctggaaaatatgatattagagtattcttgcacttctacataccaaaaagctagctaatcaggacaggtgatccaggttctgcagctccaccagggtacttccattttctatttagaatcagcctgagtctctcctgctggcttgctattgaaccatcagtccagggtcactggaaatgctctcacaatcacctaggtgtctttgagacatttgagaatctccagaacagaattgtgtcaggctgacaagagtgggcaattttgcttctgtcttagtgtaaatgaaatgagtcatcctgtgattgttcctcccctcatgcaagagctgtcttcggttggtacccagatgagagtttctccagttccctggtacttgggtaaaaacaaggaggaggtctgcagactcaaagagataaactaattgcttctatttcatatagtcattagaaaaatagatgacgcagtcatggtccctaccatgcaggaacttttagtctagactagcaactggataaatgatttaattatgcatcatatggtgggtacaataaatagatgtgtgcaaaaatatgggctttatttgggccattttctttatattgtgacttcagatgtctatacctgaacatatattaataaacaaaatttgtttttttttttttttgccttgctaagtaaacttatttatcttctaaattattctagaaaaccttaagggatttgtttaaattgcttattagtatgtgatatgaaattagagggcaatggggctaaaaaagattaaaattacacaaactctgagatttaagttttttttttttcttttaggtaagcttaaaaaaagaaacataaaaaaaaaatactccccagtggtgtaaagaacagaattttacatcaactctacaccctgcttcagccctgtttagattcaccctttttgaaggccttatttaagtcttgccctaccctggagttttgcctcacagaactaactagaagagatcagagttttgggtgatgaatcctgttgcctttttagagttggtgctcacacttttctgaaacccaatagcagataaatggaaaaataacatgtattatagggtcttaatttaataattttatattaaaaccagtgtttacagagacattccatttagcaacttgttttctgttcctgcagatatagtagttgattcacaagtcacaaaatagcaaatataaatacaataaaaattcatctacatttcattaaactctatctgtgtccttctcatctgtctgtatttagattttattccatgcattttaaaaaactcaatgataaacagaagaggaaataaaaatgctgggtctttattctaaatccttggatttattggacacttagtatcaactcacagggtattattagaatcaaataatgtgctatcacagtgctctgtaacatcctgttgatcacatagtacctgcttaataaacattgcattaatacatgtgcacatgttgttttccaaatgcagacttactcagaaaattgctgctttctgttttctctgtaaactttaaagagccagaaaataatatgatactttaagatagagaatggttgtcttcatttgcatcagaagtatttgtgtttttacaaaagtgctgagtgtaaggggctctgtgctgtacctcatttttctaactaatgctaacaatgagcccagagagagtgacaccagcattgacagaagacttgtttagaacacccatttatggaccatttccaaacctgcagaatcgcattacatagagtggggccaattttacaaagcgattcataagctcattaaagcttgagtgataatgcttaggtaagtggttataagatcaggcttctaattagaatcacatggccaatatgcagaactctctttacttgtgcccttttcacagtttctgttctgggtgaaagcgtctatttgttttaattaagtgcctcatgtgactctcaggtgccagcatcaaatatgaggagttcaagatacattcattgagttaagttccacttttgcactaaagaatgttctaggaatctgttctgtttgagtttggtaaggataggacagtgtggccaatatttctttccttttctttttctttctttttttttttgagatggagtctcgctctgtcatccaggctggagtcaatggcacaatctcggctcactgcaacctctgcctcccgggttcaagtgattctcctgcctcagcctcctgagtagctgcgattacaggtgcctgccaccattcccagctaagttttgtatgttaggtagaggtggggtttcactctgttggccaggctgatcttgaactcctgacttcaggtgatccacctgccttggcctcccaaagtgttgggatcacaggcgtgagacaccacacccagccaacttttgtatttttagtagagatggggtttcaccatgttggccaggctgctgttgaactccagacttcgtgatccacctgccttggcctcccaaagtgctgggattcgatatttctattactgtagcagaaattcctggtgtttgtaacaggggagggcgcctggggacaaaaagaagagaaacttatatttttctctctgtggagcagctcattgttcctgaatcttttttgttgtaaaggacagaaatgggtagagtttttgtgtcttgagccttctgactttgagtgtggtggtaacaggtgaacatgtgctcaaatttttaaaggcatattgtcaagatgcaggtgtaattagtccagaatatctcatctgagaaagaattctagaggaggaggagagagaaaaagtgactttttttttcagctaaacgtgtcccagatcaagagctgtgtctactctgctttctggaatgccttgcatttagtacttgcaaatcttcacttctatacctgtgttttttctccctaataagtttttcttaactacttttaaaaatgcttatgatagtcgagggtgtctgaaaaatttttctatatacaagaatcttctctacatcatggctttttatatgccatgtaagattctcaccatgaatttgtgatctgcaatattaaaaatgttctccttgtggctgatgaacatggagaggggtggatactcaatatttctgtggggaaaacctggggttcttagtaaagacatagaatatgtaatgttgaggttctatctgtgttctttattatctgtatgcattacacaattaagaaaatactcatttaaacaggatggcatttattacccagaaagctctgaaaaaattatcaagagatacctccttattagggtgctatagaaagactacttaaaatcactattacaaattacagaacatgaaagatatctgtatcttgaacttcccataaaactgatgttttcttatgattaaattcagactgtaatttagtgggtacaatatctcagtagtaatgtcgtgtccttctgggtgcatcagcacactataaaaacctgtcctagtgcagttgatgttgatgctaataactcaataagctctcttacagattttttcactatagaattatttttctcttcatcattagatatctttatggagctgatgtgcataaaccatcacgtttaatctggctgccttttgttttttgtctttttcttttttttaggttttctttacatttatttttctttggtaaatgaaagctctcatctttgtttacaggctagaaaaactaaaaaaaaaaacaaaaaacaaaaacaacaggctcttccacttactggatgtttgacaaaatagtcttttggggccaaaacattggcattactggtgagcttggtagagattcattaactcagactttatttcagatctccccaaaaaataatctgcattaacaagatgtccagtttattgtacacgttaaaatttgagtggtaccttctaactcaagatgtctattttgtctgaaaaatataaacaactatgtctttttcatctgaaaaatatacataactcattctgcattatgtaaacgtagcactcaaaaatgtatgttagtgtttatgccttcaattttacatgttatcttccagacaagtatcacatatacactgatgtggatattttgccactctattttctcagagttagagaatacattagaaaatgttcatgtgttgacaattattttattggataatttcaatcactcttataagtcagaaccagttctatttactctaattttaccttgagtcaaatgaaaaattctgccgatagccactttgtaaatatgtgtgtttgtgtgtgttttccagggactgttgacatttagggatgtggccatagaattctctctggaggagtggcaacacctggacattgcacagcagaatttatatagaaatgtgatgttagagaactacagaaacctggccttcctgggtgaggataactttaatacaaaattcctcacataaactaaagcttttatttttctttagaatgttttctggtaatttacgcattcagatttctgttttcaagaaaatactggggatttgtctgttgagaaaggaatttcttcaagatgtttcatcttgacctgaactttccacattcctgagctaatctgtgtcctgcactttagattaaggctaatttcagaagtttagtggcataaaatattgttacatcttaaaatccatttggcatcaccaatttttgattcagtagtaccaggcagtgaaattaagaacctaaaaaattaaaatatttcctaaatatttaaaaatttctgttataaattagtgtattagaataactttgttagcatattctattatatcctccttactgagcacattactaagttggtaattggagaatataagcaagattcatttagttatttttaataaaacaggtattgctgtctctaagccagacctgatcacctgtctggaacaagggaaagagccctggaatatgaagcgacatgagatggtggatgaacccccaggtaggtgagagtgaatacaacagatgacatggatgagaggtccaaagtcaagaagaaagccactctttaaagtgatttaagaagctgtgatccaaaggaaatagtttctgggaagcctaaattttttttttaaattatactctcacataggggcatcttctgcttatgcctataaaatctaagaattctactttcccttcaatgatcttcctccaagtttacagtgacagccgaagtactgttcatggcatacaaaagagtgtacaatctgacttcttttttcttgttttgtggacagacagatctgtctccataattttgagatactgtatgttaaactgttttttaagttctctttttgcatcatgtctgaaatgtgtgagagtagtagtttctgttatattgggttttttctttttggtttatttttctgcacatttcatcctgttttcattactgtagtcttgaaatatagtttgaaagtacaaagtaggatgtccttctgctttgttctttttcctcaagattgctttgactattcaaagtttattgtagtttcatgtccattttaggattggatttttcattactgtgaagaaaaacactggaattttgataaggagttctttaaatctacaggtcactttggataatatggcagtttcataatacttattctttcaatagaaataaaacattttaaaatttattagtgtcctctctaatttttttcattgatatatctttcacttgaaagatttatgagctccttgtttaaatttgttctaaaattgagtatttcattgatattgtacataagtttttttttcctctattttatcagatagtttaagtgtatggaaccatatcttgtatattaattttatattttgctaattaactgagtgtattcattaatttaaacaggttttaatgtactctctctatatacatatatatatgattacatgatctacaaacagcaacattttacttattggtcttcaatttcaatgactttaaatttttcttttgactattttgtcttccacatgctttcagtgctatgttaaaatagaagctagttttgcattagtgtctgtaaatttgaaggagcaaacacctcttcaagtttctataaactggtttcagaaagtaaaaatgtgtttttgttgggcccccagagtgatagaatgtcctctgggtttgtagtgaagaggggttgtagcttggccttaaggctgctgggtttgcacaagggtccaccttcagttgtcttcttaaaaggagcttggatagttgtaattctcatttaatttttggacagattgaatatccttcaggactttgctgtgcagggcagacccaagggcaggtttctgcactcaggcctgcatatggtgagttttatatcaggatgtggatgagcatggctttcactgagtacaggagaggattttccgaggtaactttgggtttctacataggcaaaaccggccatgaactatggctcagggagctggaactgagtcatggaactgcttcagggaccacagtaaaggtcaaggtctgcaggcctgccagcatggctctaaatgggtgtatttctccaggcctctggaaaggcaggacccccccagactgtgactgggaagagtttgggatgtttacagagtaagtttaaaattctcaggggaaccaagttaggtggaacaatttcttgtctttagccaaaaacagtagttctgtagtttgccacctgaatgaggacctgccttctgaaaagggttaccttcagtcttgggctttagcagagtttcacaactcctttcctggatctcagagttcttttaaaggcatttatttttgatctggggtattgtaacataacccaggcaggtcttaatattttgatcaaaagcaattctccaactttcatgtaccatgtagctgtcattacaggtgtgaaccatgatgcctggttctctcataaaggcatttttgtcagcaatggctgacaaattttcttgctgacagaggataagcaaataaggcacctttaattttttatcttattaatgccactctccatataaattttaactgttttctacttcaaatttgtctgtaattttagattcagacatttagggcaatataatagaatatacatgtcgtgcctgaattaaattagataattagtatgcaggcaggcaaaaaggaattatagagccaggcgcggtggctcacgcctctaatccctgcactttgggaggctgaggtgtgtggatcacgagatcaggagattgagaccatcctggctaacacgatgaaaccccgtccctactaaaagtacaaaaaattagccgggcatggcggcacgcgcctgtagtctgagctactagggagactgaggcaggagaatcgcttgaacctgggaggtgggggttgcagtgagccaaaatcatgccactttgcttctaaacttggattacagtagttttattttgtgtaaaataacatgtatttaaaacataaaaattgagactagtttcttttaaatgcttatctattaaaagtttctcattagcatctcctaattatgattttactgcatttactctgaaattttattgctacataatagatgccattaatttaaaacacctgccttccttgaatgcacagttacagtcaaacattgcagttatctagacaaattgtttgttaatgtacattaatgttgccaactagattttatgagtaaacatttctttcattattatcttccagttctatattagtgtgttttttaagtgcaggtttcttaatatcagtttattgtgtctattgatttcgtgcattataattttagacaatcggcaattctgtttgtatactttaagtcagtgtctggtttaattaaaagataaatgagccatatgtctgtcatagtcagattatctatatgtgtgtgtttatgtctacaaatatgacccaaatttggttatagtttacttgtatatattctttcttagctaattttctttttcttttttcttttttcttttcttttcttttttttttttttgagacagagttttgctcttgttgctgagtctggagtacagtgcatgtgatctcggctcactgcaacttcctccacctctcgggtttaagtgattctctagccttagcctcctgagtagctgggattacaggcatgtgccaccatcccaggctaattttgtattttttttttttttagtagagacggggtttgccatgttggtcaggcaggtctcaaactcctgaccttgggtgatctgcttgccttggtctcccaaagtgctgggattacaggcatgagccaccgtacccggcctcttaactcattttcagtgttggttttatcttgtctaagtgagtagccttggaaatagtcttattttcaccatgtgtttaatgataaatatgtattttctttgtgtgagaaaaacacttttgtgatttgaaggtaatttttaaaaagatgtataattctgtattttttccagtttttaaaaattattgttgtaaaaacacttagcatataatttaccttcttaaatctatttaaatgtacatgtcagggccaggcatggtggtggctcatatctttaaaaccaggattttgagaggccaggacaggaggattgcttgagcccaaaagtttgatacaagcctgggcaaaatatggagacaccctctctacaaacattttttttctaagaaatagccaggcatggtggtgtacacctgtggtcccagctacttgagagactgaggggcaggattagttgagcctgggattgtgaggctgcagtgagccataattgtgccattgcgtgcaagcttgggtgacagattgagaccctgtttcaaaaaaaaaaaagtgtatatttcaggcatgttaactatattcacatcgttatgcaaaagacttctagaaattttacatcttgtaaaactaaaactcaatatcccttaaataacatttacctattttatgctctctacaacccttggcaaacacccttccaccttctgtttttatgagtgtaattactttaaatatttatataagtaaaatcataacatccatcatttcattactggtttatttcagtggacataatattctcaaagtgtatctttaaaagtgacaagatttttttttttcactgttaaatattcttctttattttccatttcagtaaaacaatagcttaagatgcagggtgaatctatatttccttttttaattttatattttaatattattatactacaagttttagggtacatgtgcacaatgtgcaggttagttacatatgtatacatgtgccatgctggtgtgctgcacccattagctcgtcatttaccattaggtatatctcctaatgctatcccttccccctccccccaccccacaacagtccacagagtgtgatgttccccttcctgtgttcatgtgttctcattgttcaattcccacctatgagtgagaatatgcagtgtttggttttttgttcttgcgatagtttactaagaatgatgatttccagtttcatccatgtccctacaaaggacatgaactcatcattattgatggctgcatagtattccatggtgtatatgtgccacattttcttaatccagtgtatcattgttggacatttgggttggttccaagtctttgctattgtgaatactgccacaataaacatacttgtgcatgtgtctttatagcagcatgatttatagtcctttgggtatctacccagtaatgggatggctgggtcaaatggtatttctagttctagatccctgaggaatcgccacactgacttccacaatggttgaactagttgacagtcccaccaacagtgtaaaagtgttcctatttctccacatcttctccagcacctgttgtttcctgactttttaatgatcgccattctaactggtgtgaaatggtatctcattgtggttttgatttgcatttctctgatggccagtgatgatgagcattttttcatgtgttttttggctgcataaatgtcttcttttgagaagtgtctgttcatgtcctttgcccactttttgatggggttgtttttttcttgtaaatttgtttgagttcattgtagattctggatattagccctttgtcagatgagtaggttgcgaaaattttctcccattttgtaggttgcctgttgactctgatggtagtttcttttgctgtgcagaagctctttagtttaattagatcccatttctcaattttggcttttgttcccattgcttttggtgttttagacatgaagtccttgcccatgcctatgtccggaatggtaatgcctaggttttcttctagggtttttatggttttaggtctaacgtttaagtctttaatccatcttgaattgatttttgtacaaggtgtaaggaagggatccagtttcagctttctacatacggctagccagttttcccagcaccatttattaaatagggaatccttgccccattgcttgtttttctcaggtttgtcaaagatcagatagttgtagatatgtggtgttctttctgagggctctgttctgttccattgatctatatctctgttttcgtaccagtaccatgctgttttggttactgtagccttgtagtatagtttgaagtcaggtagcatgatgcctccagctttgttcttttggcttaggagtgacttggtgatgcgggctcttttttggttccatatgaactttaaagtagttttttccaattctctgaagaaaatcattggtagcttgatggggatggcattgaatctataaattaccttgggcagtatggccattttcatgatattgattcttcctacccatgagcatggaatgttcttccatttgtttgtatcctcttttatttcattgagcagtggtttgtagttctccttgaagaggtcctccacatcccttgtaagttggattcctaggtattttattctctttgaagcaattatgaatgggagttcactcatgatttggctggttttttgaaaggatcaacaaaattgatagaccactagcaagactaataaagaaaaaaacatagaagaatcaaatagatgcaataaaaaatgataaagggaatatcaccactgatcccacagaaattacaaagtaccatcagagaatactacaaacacctctatgcaaataaactagaaaatctagatgaaatggacaaattccttgacacatacactctcccaagagtaaaccaggaagaagctgaatctctgaagagaccaataaaaggagctgaaattgtggcaataatcaagagcttaccaatgaaaaagagtcctggatcagatggattcacagccaaattctaccagaggtgcaaggaggaactgataccattccttctgaaactattccaatcaatagaaaaagagggaatcctccctaactcattttatgaggccagcatcatcctgttaccaaagccgggcagagacacaaccaaaaaagagaattttagaccaatatccttgatgaacatcgatgcaaaaatcctcaataaaatactggcaaactgaatccagcagcacatcaaaaagcttatccaccatgatcaagtgggcttcatccctgggatgcagggctggttcaatatatgccaattaatcaataaatgtaatccagcatataaacagaaccaaagacaaaaaccacatgattatataatagatgcagaaaaggcctttgacaaaattcaatgacacttcatgctaaaaactctcaataaattaggtattgatgtgacgtatctcaaaataataagagctatctatgccaaacccacagccaatatcatactgaatgggcaaaaactggaagcattccctttgaaaactggcacaagacagggatgccctctctcaacactcctattcaacatagtgttggatgttctggccagggcaattaggcaggagaaggaaataaagggtattcaattaggaaaagaggaagtcaaattgtccctgtttgcagatgacatgattgtatacctagaaaaccccattgtctcaacccaaaatctccttaagctgataagcaacttcagcaatgtctcaggatacaaaatcaatgtacaacaatcacaagcattcttatacaccaataacagagagccaaatcatgagtgaactcccattcataattgcttcgaagagaataaaatacctaggaatccaacttacaagggatgtggaggacctcttcaaggagaactacaaaccactgctcaatgaaataaaagaggatacaaacaaatggaagaacattccatgctcatgggtaggaagaatcaatatcatgaaaatggccatactgcccaaggtaatttatagattcaatgccatccccatcaagctaccaatgattttcttcagagaattggaaaaaactactttaaagttcacatggaaccaaaaaagagcccgcatcgccaagtcactcctaagccaaaagaacaaagctggaggcatcatgctacctgacttcaaactatactacaaggctacagtaaccaaaacagcatggtactggtacgaaaacagagatatagatcaatggaacagaacagagccctcagaaagaacaccacatatctacaactatctgatctttgacaaacctgagaaaaacaagcaatggggcaaggattccctatttaataaatggtgctgggaaaactggctagccgtatgtagaaagctgaaactggatcccttccttacaccttgtacaaaaatcaattcaagatggattaaagacttaaacgttagacctaaaaccataaaaaccctagaagaaaacctaggcattaccattccggacataggcatgggcaaggacttcatgtctaaaacaccaaaagcaatgggaacaaaagccaaaattgagaaatgggatctaattaaactaaagagcttctgcacagcgaaagaaactaccatcagagtcaacaggcaacctacaaaatgggagaaaattttcgcaacctactcatctgacaaagggctaatatccagaatctacaatgaactcaaacaaatttacaagaaaaaaacaaccccatcaaaaagtgggcaaaggacatgaacagacacttctcaaaagaagacatttatgcagccaaaaaacacatgaaaaaatgctcaccatcactggccatcagagaaatgcaaatcaaaaccacagtgagttaccatttcacaccagttagaatggcaatcattaaaaagtcaggaaacaacaggtgctggagaggatgtggagaaataggaacacttttacactgttggtgggactgtcaactagttcaaccattgtggaagtcagtgtggcgattcctcagggatctagaactagaaataccatttgacccacccaacccattactgggtagatacccaaaggactataaatcatgctgctataaagacacatgcacaagtatgtttattgtggcagttttcacaatagcaaagacttggaaccaacccaaatgtccaacaatgatagactggattaagaaaatgtggcacatatacaccatggaatactatgcagccatcaataatgatgagttcatgtcctttgtagggacatggatgaaattggaaatcatcattctcagtaaactatcgcaagaacaaaaaaccaaacaccgcatattcccactcatggggggaattgaacaatgagaacacatggacacaggaaggggaaaatcacactctggggattgatgtgggatggggggatgggggagggatagcattgggagatatacctagtgctagatgacgagttaatgggtgcagcacaccagcatggcacatgtatacatatgtaactaacctgcacattgtgcacatgtaccgtaaaacttaaagtataataataataaaaaaagaaaaataaataaagttaatattgttatgtgtgaatttgatcctgtcgttaggatgctggctggttattttgctcgttagttgatgcagtgtctttctagcctcgacggtttctacaatttggcatgattttgcagtggctggtaccggttgttcctttctgtgtttagtacttccttcaggagctcttttagggcaggcctggtggtgacaaagtctctcagcatttgcttgtctgtaaagtattttatttctccttcacttatgaagcttagtttggctggatatgaaattctgtgttgaaaattcttttctttaagaatgttgaatattggcccccactctcttctggcttgtagagtttctgccgagaggtccactcttagtccgatgggcttccctttgtgggtagtccgacctttctctctggctgcccttaacattttttccttcgtttcaactttggtcaatatgacaattatgtgtcttggagttgctcttctcgagaagtatctttgtggcgttctctgtatttcctgaatctgaatgttggcctgccttgctagattagggaagttctcctggataatatcctgcagagtgttttccaacttggttccattctctccgtcactttcaggtacaccaatcagatgtggatttggtcttttcacatagtcccatatttcttggaggcttttttcaattctttttattcttttttctctaaacttcccttctcgcttcatttcattcatttcatcttctgtcactgataccctttcttccaggtgattgcatcagctcctgaggcttctgcattcttcatgtagttctcaagccttggctttcagctccatcagctcctttaagcacttctctatattggttattctaggtatacatttgtctaaatttttttcaaagtttttaacttctttgcctttggtttgaatttcctcctgtagctgggagtagtttgatcatctgaaggcttcttctctcaactcgtcaaagtcattctccacccagctttgttccattgatggtgaggaactgcgttcctttggaggaagagaggtgctctgctttttagagtttccagtttttctgctgttttttccccatctttgtggttttatctacttttggtctttgacgatggtgatgtacagatgggtttttggtgtggatgtcctttctgtttgttagttttccttctaacagacaggaccctcagctgcaggtctgttggagtttgctagatgtccactccagaccctatttgcttgggtgtcagcagcagtggctgcagaacagctgattttcgtgaaccgcgaatactgctgtctgatcattcttctggaagttttgtctcagaggagtacccagccatgtgaggtgtcagtctgcccctagtggggggtgcctcccagttaggctgctcatggttcaggggtccgggacccacttgaggagtctgtctgcctgttctcagatctccagctgtgtgttgggagaaccactgctctcttcaaagctgtcagacagggatatttaagtctgcagaggttactgctgtcttgtttgtctgtgccctgcccccagaggtggagcctacagaggcaggcaggcctccttgagctgtggtgggctccacccagtttgagcttcccggctgctttgtttacctaaggaagcctgggcaatggcgggtgcccctcccccagcctcgctgctgccttgcagtttgatctcagactgctgtgctagcaatcagcgagactctgtgggcgtaggaccctccgagccaggtgcaggatataatctgctgttgtgcggttatttaagcccgtcggaaaagcgcagtattagggtgggagtgacccgactttccagatgccgtctgtcacccctttctttgactaggaaagggaactccctgaccccttgcacttcctgagtgaggtaatgcctagccctgcttcggctcttccacgctttgctgcccccactgtcctgcgcccactgtctgtcactccctagtgagatgaacccggtacctcggatggaaatgcagaaatcacccgtcttctgcatcactcacgctgggagctgtagaccggagctgttcgtatttggccatcttggctgctcaagattttttttttaaaactgaatcatattccattctatcatacatgtcttcaaggtcttttgttgcatattttatatatagattcataaatgtaattgctgtatttgataattttatttttagttatttgaagtacatttataacataataaaatagtatgtgcatccttgttttccaccaacgatgcacatgggtttcttttttttcttttctttttttttttttgaaatggagtctccctttgtcacccaggctggagctcagtggcacaatcttgactcactgcaacctccgcctcccgggtttcaagcgattctcctgtctcagcctccttagtaactgggattacaggcacgtgccaccacatctggctaatttttgtatttttagtacagatggggtttcaccatgttgatcaggctggtcttgaactcctgacctcaaaatccgcccgcatcagcctcccaaagtgctgggattacaggcgtgagccacctcacttggccaagggttttactgcatcatcaacagattaggtgtttttaaaaaattgatagtggtcatttaaatggatgtgatggattttctttttcgttgtgatttttatgcatttctctataaattagaaattttttgtgtcctttcaaattttttgtttgtgtttttcgatgaaaatgtatttcaattattttcctatttgtaaataaattcattcaaatttatttagttttaaaagtcgtttctattttttgaatattgactcctatcacatgtgatttgtaaatattttcacccattttctaggaggccttatccctctattaaatgtttacttacatatgcagaaatttggaagtgtagtatagttaaatttttgcttttttccttgttgcttatgcatttaatgttgtagctaagaaaatggcgccaagattattgtcatgtgtttcccctatatatttttaaatgatgaagaagttatctggcctggaatggcacctcacacctataatcctagcactttggggggctgagtggggtggatcatgaggtcagaagtttgagaccagcctgaccaatatggtgaaacctcatttctactaaaaatacaaaaaattagccaggcgtggtggtgggtgcgtgtaaacccaggctactcgggaggctgaggaaggagaataacttaaatccaggagacagagattggagtgattggagagcatgccaccacattccatcctgggcaacagaatgagactctgacttcaaaaacaaaaaaagttatcttcttatgtctaattaaaagatttttccacatatggtttaaggaaataaactttattattgtattttttattttttttgagatgaagtctcactctgtcacccaggccagagtgcagtgacacaatctcggctcactgcaacctctgcctcctaggttcaagcgattctcctgtctcagcctcccaagcagctgggactacaggtgtgtgcgaccatgcctggcgaatttttgcatttttagtagagaaggggtttcaccatattggctaggctgatctcaaaaccctgacctcaggtgatccacctgcctaagcctcccagagtgctgggattacatgtgtgagccaccattcctggccttatttgtttgttcttgagatagggtctcactctctcaaccaggctggtttgcagtgttgtgatcatggctcactgcagcctcaacctcccaaacttagaagattctctgattgcagcctctcaggtagctgggttacaagtgtgtagcttcatgtcctcccagtttttttgtatttttggttgagacaaggttttgccgcattgctgaggttggtctcaaacttctgagatccagtgaacaccccactttaacctcccaaagtcctgagattacatttctttttattaagtagtttaattaatttatatttaaaattatttcttaaaatgaaattactagttttattgctattgttttatgtgtttgagtggtatgttttttcttatttactgttttattgccttattttaattgtgtagtgacatgcttcaattattttttaaattttgttttgcatactttctataaatattatcttcataatcctcttgtatattagtctgttttcatgctgctgataaagacatacctgagactgggcaatttacaaaagaaagaggtttattggtcacagtttcatgtgactgaggagtcatcacaatcatggtggaaagtgaaaggcatgtctcacatggtggcagacaaaagaaagagcttgcgcaggaaaactgccttataaagccttctgctttcatgagacttattctctatcatgagaacagcacagaaaacatctgcccccatgattcaattacctcctactgcatccctcccacaacatatgggaattaaagatgagacttgggttgggacatggccaaaccacatcatcttaaaaatggaatttacataaaacatctaaaacttaaaaatatattttaatctcatgacaacttcagttgaatataaaaattatacctctgtatttttcagtttattaatataaaaattattttgtgtattaacatttatgcagatttttattgttttaaatattctacagaagagctttaagggttttatgcatcatcattatgatagtaaagatttctacatttgtatatttacattcaatagagagctttatttttatatatggttttatgatgctgtccagtattattttatttttaaataaaattgactcattttagcatttctttgttgttgttgttgttgttgttgttgagatggagtcttgctctgtcacccaggctggagtgcagcgggacaatctcagctccctgcaagctctgcctcccgggttcacgccattttcctgcctcagcctcctgagtacctggaactatacgcggctgccaccatgcctggctaattttgttttttttgtgtatttttaatagagacggggtttctccatgttaaccaggatggtctcaatctcctgacctcccgtttcttttttttatatgcaaactctcgctgtattattcaggctgatctgaatctcctggtctttagtgttgtgacagctttggcctcttaaaactgcaggattacaggcatgagccacagtgcctggccatcatgtagcatttttttgtagaactgtgctagtggtgatgaactccctcaacttttattttggagatttttagttttcatcctatttttaaagggaaataaatttaaatcaaatattcttggttacaatttttgtttgtttgttttactacatcaaaatttgggaaattctcaccttttatcttcaagtaaccactgtattgtttttttttccccatattcttcttctaagattaccttaatgaatatattgatctacttgatggtgtctaataagttttacattccatgttttaattttgttttgcaattttatatttttgtgttatatattctagcatatgccaccatacatctgatatttgtgttttgattttttagtatatatcataattgtgcatgacaatatttaactttgtacaatttaagaccctgtggagcaaaatcaaatatgaatcagccatatgtctttttccagtagaattatatctgtttgtttgcctgtataaatgttatcttttttaaattttttttttgagacagagttttgctcttcttgaccaggctggagtgcagtggcacgatcttggctcactgcaacctccgccttccaggttcaagtgattttcctgcctcagcctcccaattagctgggattacaggcgcccactaccaagcctggataattattgtatttttagtagagacagagtttaccatgttggccgggctggtcttgaactcctgacctcatgatccaccctcttcagcctcccaaagtgctgggattacaggtgtgagccaccacaccaggctacccttggtttttttttgtttgttttttgtatatttgttgtataggtttgttgtgaatggttttctaatcctttgtagatgagtagttataaaattcttgtaatttcaacatcctatttatgaatctatatgatttttgtgtgggagaaacacttttggatttgaatataatttaaaactcccataactctgtatctcttttgggtattattatttttacttgtcaaaaaaataacaaatttaccacaaaatatttttaaatattcagttaagtcacactaattatcttgacattgtcatgcaacatattgctagaatgtttttatcttgcaaagctaaatcttaatacatactgactaccacttttttcttgttttttttcttttttgaggtggagtcttgctctgtcacccaggctgaagtgcagtggcaccatctcagctcagtgcaacctccacctcctaggttcaattgattctcatgcctcagcctccttagtagctcagattacaggtgaccgccatcatgcctggctaatttttgtatttttattagagatggggtttcaccatcttggccaggctggttttaaactcctgaccttaggtgatccacccgcttgggtctctcaaagtgctcagattacaggtgtgaaccaccatgcctggccccaattttttctgttttatggcactttgcaaacgccagtctgttctttgtttctaagagtgtaactccttcatatatttcatacaatctgtcgttttgtggctggctcatttcattttacataatgccatcaacatttatctttatagttcgtacaatatttcctgctttttgaagactgagtgatatttcagaatttttatatttcaaattatatctactgaatgatttggtgaaagaaatctgccttgcttttacctattggcttacagtaacaatgctgcaataattatcactatgtaaatgactccttatatgaccatgtatgtgaaagtttatatatgtgctgcattctattttattagtctactttttcacctttatactcataccaaattgttttaattctgtagctttgtagtgtgatttaatcaagaactttaatgcctccagcattgttccttttattttttgaagattgttgggtactttattgtctcttgagattctatatacttttggggttgctgttcctgtttcttcaaaaatgcagtgagaaatttgaaaaacattcattaagtctgtctgttgcattgagctggatggaccttttcagaatattaattatttcaacctttgtttaaaagcacactcaagggtgtgttgtttaatttctatgtatttgtaaatttttcagtttttctgtcttattgttttatactcgtactccattttactcatagaaagtagttcatagaagtttacttttaaaaagtttggtaagacttcctttttggcttaagatgtggtttatcaagtaaaatgtatgagctattgagaaagaggtgtattctgatgttgtcgaggagtgttctccataactctgtttggaataattgttttatactgcctttaagtagtctgttcccttattaacattctttcttgttttatttttattacagaaagtgtggtattaaaatatcttgctataattgtattgctttgtatgtgtttcttccattctgtcaatatttgctttatatatttggaaccctaatgtgagacacacacacacacacctgcgtgcgtgcacaaacacatacacacacacacacaaatatacacaaatttttcataggttcccagtgaatgaatctattattttttgatgtcctttgtttctttggagtttaaatttaaagtacattttataaaatattataatttttgacttaagatgtagcttgtgtaagattattttgactgtttctgctctcatttgattaatatttgcatggaatgtctactttcttcctgcctcttccagtctttttttatcattagatttcaactgactcttgtagaaaggcaagatgaatctcagtttttaaaatattttaataaaactatttattgaaaatatgtctcaatttaaaagttaattttatatatattgaaataattttctgaaatagaaagacttactgttattttattaagtattttatttgattcttgcatctttgtcttttattctctttccatctttctttgtgtctttttgatatttgtattgataggctttgacttattttgttttgtgtatttatacaaatatttttgtggtacattggggattacatataacctctaaaagatacaacaacatattttaatctggtaaataaacttaagttgcgtacaaaaatttgttcttattataccttccctcaaatttgtcattgatgttgttaattatatctttttatattgtatattcattaatgaatatttaaaatgttttctatgcttttatccttcaaatttcagagaataattaaaaatgttttctgcaccactagggtaatgctaagaaatttgacttttgtgtatttgcatatttttcccagaaaatcatgtatttttatatgattctgtgtttttattggaatcatgttattttcagtagaaggaactcttttcagcaccttttatatgtagggcatatgcatttccaatatacttttttagaatttggttactttggaaggtttttactttttttatttggcaggacagatttgctgatggtattattctcaattaattaaaccttttttttttccacaatttttgtcatgactacatcacacagttcccttatggcctgcaaaatttttgttaacagttcactgactatctcataagattatgtttgtaaatggcacatcactttttttctttttcttttttttttttggaaacaagagtctcactgtatcctccagccaggcttgagtgtagtggtgtgacctgagctcactgcaagctccacttcctgggttcaagtggttccccttcctgggttcagcctcagcctcctgagtagctgggattacaggcatgcaccaccatgcctggctaatttttatagttttagtagagacggggttttgccatgttggtcaggttggtcttgaactcctgacctcaggtgatcggcccaccttggcctcccaaagtgcctggattacaggtgtgagccactgtgcctgacctggcacatcagttttatctggcagcttcaaaggtaatctttttgtctgtgacttttgaaattgtgcttatgtatgtgtttgttataaatatctttttgttattctagtttgtttgttgagcttttttatttttacatctttttttttttttttacttttaggatctgtcagtttttttgtgtatattttatctccacaatttgttttttgatatcttaactattttttattcttgtcctcatttttctgattttccatagttgtttctgttcccattttaatcagtattattcagtttattaccaattattaaaattaatgtatacatcttttttatgatttctttcagaaaattttgtgatatttttggtgggattgtattgccctattttgtatatattataatccttgattaagatttagacattaaaaaaagctacttgtcaaaatcttataatgtagctttgtcatggcatattctgaaaacaattgtctttgctggtgattatgagagtttcttaaacatattcttaggatatgtgttgtctgaaattttatttttattatttaattaggagagattactcgttaatttgtagcgtcatcacttgctacaccttttccatttctgtggtactgcagtctctctgctgctgtaacatttttctttggtctcagcagactcaaactctcattccaaaatataccaccatttctttcagtactttatgtcatgagagacagaaaccagtgtcaggaaaaaaccctaaaagccagaaatggcaatgattgtgccggtattttacctttcttttaaaacagaaaccaagagttggcaatttacttgtaaagacactatggtatagtgggaaacaggaaaagatgtattgagtaaatttaacagacttttctttttcttctttgtgtttttttgcattgtgctcacctgggacactgcacacacttaaatcatttatgaattttccacagatgtattttggtctgaatgtttttgttacatttatgtctatgaaagaattagagcctgtggtattttgcaatgctatcttgtctatgtagtttgtataattttataggtaagatttttaaactatattcatgtgagtctagtaagtggagtaatttatttatttttatttttttttcaggtatgtgtcctcattttgctcaagacctttggccagagcagggcatggaagattcttttcaaaaagcaatactgagaagatatggaaaatatggacatgagaatttacagttaagaaaaggctgtaaaagtgtggatgagtataaggtgaacaaagaaggttataatggacttaaccagtgtttcacaactgcccagagcaaagtatttcaatgtgataaatatttgaaagtcttctataaatttttaaattcaaacagacctaagataagacatactgaaaagaaatctttcaaatgtaaaaaacgtgtcaaattattttgcatgctttcacataaaacccaacacaaaagcatttatcatagagagaagtcctacaaatgtaaagaatgtggaaaaacctttaattggtcctcaacccttactaatcataggaaaatttatactgaagagaaaccttacaaatgtgaagaatataacaaatctcctaagcaactctcaacccttactacacatgaaataattcatgctggagagaaactctacaaatgtgaagaatgtggtgaagcttttaatcgatcctcaaatcttactacacataagataattcatactggagagaaaccttacaagtgtgaagaatgtggcaaagcatttatctggtcctcaacccttactgagcataagaaaattcatactagaaagaaaccctacaagtgtgaagaatgtggcaaagcatttatatggtcctcaacactaactagacataagaggatgcacactggagagaaaccctacaaatgtgaagaatgtggcaaagcttttagccagtcctcaacccttactacacataagataattcatactggagagaaacgctacaaatgcttagaatgtggcaaagcttttaagcaactctcaactcttactacacataaaataattcatgttggagagaaactctacaaatgtgaagaatgcggcaaaggttttaatcgatcttcaaatcttactacacataagataattcatactggagagaaaccttacaagtgtgaagaatgtggcaaagcatttatctggtcctcaacccttactaaacataagagaattcatactagagagaaaccctacaaatgtgaagaatgtggcaaggcatttatatggtcctcaaccctaactagacataagaggatgcacactggagagaaaccctacaaatgtgaagaatgtggcaaatcttttagccaatcctcaacccttactacacataagataattcatactggagagaaaccctacaaatgtgaagaatgtggcaaagcctttaactggtcctcaactcttactaaacataagataattcatactgaagagaaaccctacaaatgtgaaaaatgtggcaaagcctttaagcagtcttcaatccttactaaccataagagaattcatactggagagaaaccctataaatgtgaagaatgtggcaaatcttttaaccggtcttcaacttttactaaacataaggtaattcatactggagtaaaaccctacaaatgtgaagaatgtggcaaagcatttttctggtcctcaaccctaactaaacataagagaattcatactggagagcaaccctacaaatgggaaaaatttggcaaagcctttaatcggtcctcgcacctcaccacagataagataactcattggagagaaatcttacaagtatgaataatgtgccaaagcctaagaaaaccctcaattcttaatagatataagattattcctactggagagaaactacaaacctgagagaggcgctaatgcttttgacagtacctaaaactttaaagaaaatcattctgctgaaaaatcctagaaatgtgaagaatgtgaaaaagcctttaaatgattgtcacacttgattgtaggtaagataattcatactggagaaaactaccagtgtgaacaacgtggccaagcttcgacaatgctcacaccctattgcacaggaaagcatttatacttgagaagaaatgtacaaatattggcaaagtaaaaaatccattaacacctgctcacatcttactcaaaattgtagagttcatagtaaataaaagcattaaaattctaattactctcagaagatctgtcagaaagtatgtctttaaagtatagaagagcatttattttgaaaaaaacattacacatatgaagaggattgtaatatctttacttgtaccacagatcttattgtacacattttatactagagaaaaaccctcaggcagttgttaaaattttgttgaacatcagggagtttaagaaaaccctgcaagtataatgaatttggaaaaacattttttcaaaaactacaaattataaaacaccaaagtgttcatactaaaatatatttttgcagatacattaaatatgaaagatattcaatccaaaattaagtctatgtaaatatcagggaataattcacagtagaaatatctagggcattcaagctttagacattacactaaatcagagtgctgagtatagaaaataatacaaacagatttgtctaaacatttgtatataactttaaaaatagaatattttttggagggttataattacattcaaagtacttttttttgaaaatacagattttttttaaaagtgaataatgtgttcaactcttaaattcatgctgtttcatcattgctggtgtattcatatgtgaaagcatgtgactaattgttgctgcataaaagatatgagattcttttttattaggcattatttatgaccttttctatgaaaagataaggacattaaaatgtaagatgcgtgaggaaaatttaggtagagaggctctttgtggttaacttataatattgagtgatgcatgaggtaggtgttcagaataatattcctctgcattattatgaatgaaaagcattcttaattttagttaaaattaagttagtcatatgttattttattaattgtacttctatgaaataatatgcagtctatttttaaattataaattatgtgtgaacttagcttttcaattcaacatttttaacatattaaatactattgtgaattcaatgaagtgttcttatgccactaactttaacctattcccttactcaaggatgtaggtaaaagatggtaacaatacactatttggtaagataatgtactgacatctctagcaatcttttttgccagtggctttaaattgccaataagttaaagaatattgttcctatgggttaaatttttattcttattttcacatttaaatttatttttcttaatttttgtggatacataatatgtgtatatatgtatgccatatatggtatattttgatgcaggcatactctatataataatcacattagaggaaatgagatatccattacctctagcatttattctttttattacaagcaattcaattgtacacttttagttatttttaaatttacaatgttattgattacagggtcatttttatggtcataataaaaaattttatacaaacgtgtaaaatctatacatttctgagttctgaataaatatttttaaaaattttaatatatttttctttgaatatgtgacctttgcctgcaagcacatatggactcttagaattgatttacataaaattaaatatatacttctattaaagataaaccttaggtgtaaataaattatggagtaagtatgtttgtgtgagtataagtttgaaactatttttagcagcaaaaagaaatactcgaacaaaataaattattttaataaggtgtctaatttactagaaaacaaaaattttcaaaaatgctgaaaccaaatctatgctatttgctttgtattgaatttattactgtacagtctttgtgcttatgattcagaatctccgcatgcaaattctgtgttttaacttgactgatactcatgctagactcataactttctttgtttgttaattgtttgtttatttatttatttttgagacggagtcctgctctgtcacccaggctgaagttcaatagtgtgatcttggctcactgtaacctctgccttttaggttcaagcaattctcctgcctcagcctcccaagttgctgggactacaggtgcccaccaccatacccagctaatttttgtatttttagtagagatgaggtttcaccatgttggtcaggctggtcttcaactgaccttaggtgatccacccaccttggcctctgaaagtgctgggattacaggcgtgagccaccacgcccagcctgtgtaatagtctttgaagtattcattatgtgagctggtctgtaattataagaatatttttttttaattttattgttccataagctattggggtacacatggtgtttggttagatgagtaagttcttaagtggtgatccgtgagatcctggtgcacccatcatccaagcaggatacacttcaccatataagttgtcttttatccctccccactcccactcttcccctcaagtccccaaagttcattgtataattcttgtgcttttgtgtcctcatagcgtatttcccacatatcagtgagaacatatgatgtttggttttccattcctgagttacttcacttagaataacagtctccagtctcatccaggtcattgcaaatgctgttaattcattcctttttgtggctgagtagtattcctgtgtgtgtgtgtgtgtgtgtgtgtgtgtgtgtgtgtgtgtgtatccactcgttgattgatgggcatttcacttggttctatgattttttagttgtgaattgtgctgctagaaacatgtatgtgcaagtatctttttcaaataattactagtttttcttggatagatacccagtagtgggattgctggatcaaatggtagttctacttttagttctttaaggaatatccacactgtttttcatagcagctgtactagtttacattcccaccagcagtgtagaagttgtttgaaatgtttgttcctcagtgccataaagaaatagcacttgaacataaatttaacttatttagtaaggccatttttacttcctgcagaaagtatacactcgtcagcagttttgccacgagagtacaatgaataaaggagacagggtcatttataacctgacgcatccaccctactgctgtgtccggtttccattggctagaatgggacctcacattctgtatttatcccaattggctagcatcttagaactttttaaaagaggcaaaggtaaaggagaacaaagaaaggagtaagtaacttgtgggatgctgagaaaggtaaaaccacttttaaataaggaagaggagcaggctatgacctaatgcttgcttggaccagtataagcatgccagggcaaatatttaggagcacaggtctttgaataaattttgtctctaagaaaagttacaatttattcctaattagatggggggggggaatctttgaagaggaacctctactttactttttacaaagtgttccctaatcaccacatccatgccaacatctacagttttttgatcttttgattatgaccattcttgcaagaataaggtggtattgcattgtggttttgattttcatttccccgatcattagggatgttgagcattttttcttatgtttgttgtccatttgtatatcttctttagaaaattgtctattcatgtccttagcacagtttttgatgtttttttttttcttactgatttgtttgagttccttgtagattctggatattagtcctttatcagatgtatagattgtgaagatttcctcccactctgtgagttgtctgtttactctgcttactgttcctcttgccatgcaaaagctctttaattaggtcccagctatttatctttgtttatactgcatttgcttttgggtttttggtcatgaaatttttgcctagccagtgcctggaagggtttttccattgttatcttccagaatttttagagtttcaggtcttaggtttaagtccttaatccatcttgagttgattttttttataaggtgagagataaggatctggttttattctcctacatgtggctaccatcccagcaccaattgttgaaaagggtgtcttttccccactttatgtttttgtttacttttttgaagatcacttggctgtaattatttcagtttatttctgggttctctgccattggtctatgtgtctatttttataccagtaccacgctgttttggtgactatggttttatagtatagtttgaaatcaggtagtgtggtgcctccagacttgttctttttgcttagtctttctttggctctgtgggctcttttttggttccatatggtttttagaattttttttttctaactctgtgaagaatgatggtagtattttgatgggaattgtgctgaatttgtagattgcttttggcagtagggtcattttcaaaatattgattctacccatccttgagcatgggatgtgtttccatttgtttgtgtcatctatgatttctttcagtagtgtttggtagttttccttttagaggtcttttgactccttcattaggtgtattcctaacttttttttgtttttttccagctattgtaaaaggggagttcttgatttaattctccatttggttgctgttggtgaataaaagagctactgatttgtgtacattaatcttgtatccagaaactgctgaattctttgattggttgtaggagccttctggaggagtccgtagggttttcaaggtaaattatcatatcatcagcaaacagggacagtttgacttcttgtttactgacttggatgccctttatttctttctctgttctgatagctctggaggacgtccaggaatattttggagaggagtggtgagagtgggcatcctagtctttttcccattctcagagagaatgctttcaacttttcctcattcagtattatgttggctatgggtttgttgtagacagcttttattaaattaagctgttccttgtatgccaactttgctgagagttgttttttttttttttttttttttttttttttttttttttaacagagttttgctcttgttgcccaggctggagtgcaatggcaggatcttggctcaccacaacctccgcctcccgggttcaaacgattctcctgtgttagcctcccaagtagctgagattacaggcacatgtcaccatgcctggctaatttttgtacttttagtagagatgaggtttcatcatattggtcagactggtcttgaactcctgacctcaggtgatctgcctgacttagcctcccaaagtgctgggattacaggcatgagccaccatgtgcccggccaagctgagagttttactttcaaagggatgctggattttgtcaaatgctttttctgcgtctattgagatgatcatgtgatttttgttttcaattctatttatgtggtgtatcacatttgttgacttgtgtgtcaaaccatccctgcatccctggtatgaaacccactttatcatagtggattatctttttgacatgttgttggattcagttagctagtattttttttaaggattttagcatcaatgtttgtcaaggatatttgcctgcagttttctttcttagttgtgtcttttcctgattttgatactagggtgatgctggcttcatagaatgaattagggagggctccttctttctctatctggtggaatagtgtcaaaaagattggtaccagttctttgaatgtctggtagaattctgtgaatccgtctggtcctggacattttattggtaattttttgaattaccattttaatctcactgcttgttattggtctgttcagggtatctaattcttcctgatttaagctaggagggttgtatttttacaggaatttattcttctcttctaggttttctagtttatgtgtgtaaaggtgttcatagtagccttgaatgatttttttgtatttcagtggtgtcagttataatatttcctgtttcatttctcagtgaggttatttggattttctctcttttcttggttaatcttgctaatggtctataaattttatttatattttcaaagaagcagctttttgtttcatttaccttttgtattttttttgtttcagttagttctgctctgatcttggttattttctttttttgctgggtttgggtttggtttgttcttgtttctctagtttcttgtggtgtgtccttagattttctgtttgtactctttcagactttttgatgtaggcatttagggctatgaactttcctgttagcaccaccttagctgtatgccagaggttttgataggttgtgtcattattgtcattctgtttgaagaattttttaattttcatattgatttggtttttgccccaatggttattcaggagcagcttatttaatttccatatatttgcgtggctttgaagttttctttgggagttgatgtccagttttattccactgtggtctgagagagtgcttgatatagtttcagttttcttaaatgttttgaggctcgtattatgacctatcatatgatctgtcttggagaaagttccatgtgctgttgaggagaatgtgtgttctgcagttgttgaatgaaatgttttgtatatatctgttaagtccatttttttccaaggtatggtttaaatccactctttctttgtcgactttctgtcttgatggcctgtctagtgctgtcagtggagttgaagttccccactattatagtgttgctgtctatctcatttcttaggtctattagcaattgtttttataaatttgggtcctccagtattaggtggatatatctttagggttgggatgttttcctgttggaccagccatttactgttatataatgtccctctttgtctcttttaaccaccgttgctttaaagtttgttttgtctgatataagaatagctgcccctgcttgtttttggtgtccatttgcatgaaacgcctttttccacccctttactttaagtttatgtgagtccttatgtgttaggtgagtctcctgaagatagcagatagttgattggttagttcttatccattctgcagttctgtatcttttagtggagcatttaggccatttacattcaatgttactattgaaatgtgaggtgccattgcattcattatgctctttgttgcctgcatactttggtgttttttttgttttgtgtttttttttttctgttttttgtttgtttgtttgtttttgagatggaatctcactctgtcacccaggctggagtgcagtggcgccatcttggttcactgcaacctccccctcccaggttcaagcgattcccctgcctcagcctcccaggtagctgggagtagaggtgcccaccaccacgcgtggctaatttttgtgtatttagtagagacggggatgcaccatattggccaggctggtcttgaactcctgaccttgtgatctgcccgccttggcctcccaaagtgctgagattacaggcatgagccaccacacctggcctttttttttggtttttcatttttgttttttatcttgtatttgtgttttataaatcctgtttgatttatgctgtaaagagattctgtttggttgtgttttcaggatttgttttatgatttaaggtttcttttggcatttttgtattaggggcttgttaatggtgaattctctcagcatttgtttgtctgaaaatgactgtatctttccttatatataatgcttagtttcactggatgcaaaattcttgactgataattgttttgtttgaggaggctgtaggtggggccccaatcccttctaacttgtaaggtttctgctgagaaatctgctgttaatctgataggtgttcctttataggttacctggttcttctgtctcacagctcttaagatttttttgtcttaactttggataacctgatcacaatgtgctaaggtgaagatctttttgctatgaatttcccaggtgttcttcgtgcttcttatatttgtatgtctaggtaaggccagagaagttttacttgattattccctcaaatatgttttccaagcttttagaattgttttcttcctcaggaacaccaattattcttaggtttggtcatttaacataattccagacttcctggaggctttgtttatattttcttattctgttttgtcttcgttggattgggttaattcaaataccttgtctttgagctcagaatttcttcttctacttgttaatttttattgctgagaatttcctgatcatttcacatttctaaaagtgtgtccaatgtttcctgaattttttttttaagctatctgtttcattgaatattttgcccttcacttcttgtgtgattttttgtatttccttgtgttgggctttgcctttctcccatctctccctgattagcttaataactaacctcctgactccttttttttcagataaatcagggatttcttcttggtttggttctgttgctggtgaactagtgtaatttttttggggggtgttgatgaacgttgttttgtcatattaccaggtttgcttttctgttccttctcatttgggtaggctttgtcagagggaaggtctatggctgaaaactgtttagattttttgacccacagggtattccctttttctgtggatgtggctttccatgagctgaactgtagtgattggtgtctctcttctgggtctagccacccagtgagtcttccctgctccaggctgatacttggggttgtctgcacagagtcctgtgatgtaaatcgactgtggatctctcagccatggataccagtgcctgttccagtggaggtggtgaagggtgcagtggcctctgtgggagtccttagttttgatggtttaatgctttatgtatgtatttatttttgctagtgggcctcctgccagtaggtagcacttctagaaagcatcagctgtagtagtgtgcagagggactggtggtgggtggggccttaggactcccaacattatatgtcctttgtcttcccctaccagggcagatagggaaggaccattgggtgcagggggcactggtcgtgtctgagttcagactctccttgggcaggtcttgctgtggttggtgtaggggatgcaggtgagagtcccaggtcactggagttgtgtacctaggagaattatagctgtctctgctgagccacacagagtgtcaaggaagtgggggaaagcgagtagtcacaggcctcactcagctcccatgcaaaccagagggccattctcactcccactgtgtactccacaacaaccccaagtctgtttccagatggaaggctagttgggcttgaaaattgctcaaggctttctgccttccagttgcaggaaaaaaaagggctttagttcttccccgcctgtgaagtctgcaagccagattcgcgcctttccctgagttctgggcaggaggcttcttggcccgttcaaattgttacaaagttcagctaaggaagtctttttccacttggaattttacctctgctcctctgtcctccctcctgaaggatccctgtggtgccaggcaggaatgggctgcttggggatttatcaagcccccagggcctccctgctgcctgctccacccctgtatttcactcagcttggctctaatttgatgcagctccaggtagtcaggaaattatcccacaaacagactttcagcttctccagtgggggtgcgtgtttgggagaggagggtctccctttctcacttctgcatttggggcactcacagtatttggagtgtctccagggtcctgcagtagcagtctgcttccttcagagggtctgtcctgatgcctttaaagacacattctcaagattctcagataagtgtgtcccaggtaaaaacagtgtccacattttcttttagaatgtcatgtgtttagaattgcagtcatttacatttctacttctgatgcttttgcctaagaagattatttcaactacctttccccttttcttctcatgacagtgaaaggacttctttaaaataattctcccctatatatcagagacttgtctttattctctccatccaggcttcttacatatcacaaataatactcatcttgagtttatatgctgaaatattggaagtattccctatgttgacaggtcagcctgggcaggtgggaatataaaacattcttattggggatggtgctgggtcctcagatatcagtgagggagaaaagtgcactgtttaggttccatctgaatgctccatcagctctatgaagaatataatttttaaatgcacacttaaaaaggatggaattggccaggtgtggtggctcatgcctgtgatcctagcagtttgggaggccgaggcgggtggatcacgaggtcaggagatcgagaccatcctggccaacatggtgaaaccccatttctgctaaaaataaaaaattagctgggcttgttggcatgtacctgtaactccagctactcaaaagactgaggcaggagaatcacttgaaactgaaagaggttgcagtgagatgagaagatgagatcacgccactgcaatccagcctggtgacagagcaagactctatctcaaaacaaaacaaaaggatagaattaggctgggcacggtggctcacacttgtaatcccagcactttgggtggccaaagtgggtggatcatgatgtcaggagttcaagaccagcttgagcagcatggtgaaaccctgtatctactaaaaacacacacacaagcaataaatctggaaaacattttccagttaaaaacacacacacacacacacacacacacacacacaaaattagctgggcaaggtggtgtgtacctgtagtcctagctacttgggagacaggcaggagaattacttgaacccaggaggcagaagttgccttgagccaagattgtgccattacacaccagcctgtgtgacagagtagactccatcccccccccaaaaaagaaaaagaatgggtagcctggaataattagaaagatatgcaaaggaagtaattcaaagaaatgtgacttctagaatgctacagagagtatttaaatacactattagaaattacaaaacatgggcaacatgtggcttgaactttacataaaacatgtttttcataattagattctgattctgatttacattttttggccagtaatttcaccgaagtcatgttgcatcatcctatatgtatcagcacataataccaatctgtcccattaattttattcacttggttaatgtgttttctgaaagacttcttcccccttccccgagatggagtcttgctctgtcatccagagctggagtgcaatggcacggtctcagctcactgcaacctctgcctcctgggttcaagtggttctcctgcctcagcctcctgagtagctgggattacaggcatgagacaccacgctcagctaattattgtatttttagtaaagatggggttcaccatgttggccaggctggtcttgaacttttgacatcatgatccctctgccttggcctcccaatgtgcaggcattacaggtgtgagccaccactcccagccaggatttcttcactctaaagttactttataaaaactgtattattcacaattactttggagagactttctgattaatgtgaataaacacatttaatctgaaatctcccctgttacaccaagtatcaggttccagtccaagctgaggtctgacgggagtcggtgggtgagtggtgggttgctggaaaaacaatcgaggattggtggggagttttggcatggctttattctctctatggtcacaagcctggtcatgagccctgtgtacagggtcagcagctttactctctctccctctcctgtccacctttctgtgtactcctaacacataatagtggctgagagccaagtatgatcttacacaaccaggttacataatgagtagaattgtgcatgtgtgctccaaactcactgagtcatgctgaaccagatgtttacctcggcctattcttgaccacagcacatccatttttcttacattccttttcttaatagtttatctttgtttatacgttgctttggaaaatgaagtgtgtcatcttttttttactggtcatatacagtgggataaaacccaggttcagtcacttactatatgttttaaaaagtattttccttaagctagaatcattgacatcattggtcagtttgttagcaatgcagtaactcaggtctcatcccagatctgttgagttagaatacatattttaacaaaatctccagtttattgatgtatgcattaaaatttgagaggtaatttctaatgtcctgtgacttctccatatgggaactatacacagtttactctgtataatgtaaatatagcactcaaaactgtatatgcttgtgtttgtgccatacattttatgctgtatcatcagaaaagtatagtacctacactggttttgtggatcttattctctttcctcagaatgatggaatacattagagaagctttctctattaaataatattttactggataatttcagtctcatgtaaaacagagccagttctcttaactctcaaacacctagagtaaaattaaccattctgcctatggccactttctaaatatgtgtgggtgtttggggttttttagaagatgttaatattcaaggctgtggccatagaattctctcaggagtagtgggtgtgtctgaatcctgctcagtgaaatttatatagagatgcggtgttagagaactacagaaacctgctttctttaggtgagagtaatttttccccagatttcctaatataccttaaagcttctattttatccctttgtagaatgattttgggaatttttgctatgcataaattatttttagatcaataaaattaaggaaaacttgaagttattggaatagaaaagaaaattttcaagatgttatatcttaacaggaaacttcccctttcttgagctaaactgtatctttcactctagattaatgataattctagaaattcagtggcataaagtattttccccaagtattaaaatccaatattcatcaccaattttaaattcaatagtattgaacagtagagctaaggatccagaaaactaaaatacatattaaatattttaacctaaatattctaaaggttctgtcagaaaacagtattttggaattaaaattctagaatccttcataatattctctcctctctactgaacagagtactaggttggtaactggagaatcccagcaagtcatattacttttttttctaacaaaacaggccttgatgtctctaacattgatctgatctcctgctttaagcaaataaaagagccctggaatgtgaagagatatgagacagtagtcaaatactcagatagctaagcatgaatgaggcagataacaaagacaagaggtacaaaggtcaaagaattccagaccttaaaatgtggtatgtgttgctctgcttcaatggaaatatttcctagaaagtcatttttttttctagctctcaaataggagcatcttttgttccatacccttaaattctctaagggctccacttcctacttagtgattttcctttgagggtcttgtgagagctaaggtcctctttatggcttatgaggtatcacatgttattcctgttgttccattgctttggggggatataagaacgcctcttgattatttttgagcagctgcatataagattatttcttaagttttcttttcccatcatgtctgaaatgtgtgagagcagtggtgatattaagatttgtttcagaaatcttaggaacattaatgacagatgttacttgttatttttctattttttcattttgatattagcaatcctaacagatttgaaatggtagttcctcattgttttcatttgcaattgcctgttggtaggtgatattgaacacgtttttatatatctattggttatttgtatatgttggcaaaatattttttcagtcttttgaccatttttcaggtggattgtaattgtttttattatacttgcctctactttgaatttcctatatatttttaatattaaacttttcttgtatatattgtttgctattgtgagcatgctgcagtaaacatgcaagtataggtagcattttttttttttttttgagtcggagtcttgttctgtcgcccaggctggagtgcagtggctcgatcttggctcgctgcaggctccaactcccaggttcacaccattctcttgcctcagcctcccgagtagctgggactacagacgcccgccaccatgcccggctaatgttttgtatttttagtagagatggggtttcaccgtgttggccagggtggtctcgatctcctgagctcatgatccgcccacgttggcctcccaaagtgctgggattacaggcgtgaaccaccgcacctggcccagatatcattttcatataataaatgatttttctttgggtagatacccaatgatgagatctctgaatcaaatggtagctctatttttagttgagattgagtttttttttttcatatgcatgttggctatttgtattctttattgaaaaatgcttagtaatgttatttgcctattttcaatggaatcctttttttattattatgacatttttgagttgtttgaattatttgtaaattctgaatattagttacatgttggcacatagttcgcaaatatgttcttttattctgtaggttgcctatttaccctgttgattatttttcttgctgtgcctaaacattttagtttgaatcccatttatctattttttataataataacataataatagttttttttgttgtgttcttgactagttttggtgtcaaggtgatacctcagagtgacttaggaagaatttcattatcctgaatttttgggaagagtttcaggaggattattattcttagtgcatttggtagaatttggctgtccatttatctactcccgagcttttctttttcaagactttttttattactgcctcaatcatgctactcattattggtttgtgttactgttgtatccattgaaatgtctgttctttcacttctgattgtttatttagatctgtcttctgcttttggttaagctagctagcagtttatcaattttgtctttttgaaaaatcaactattctgttgatcatttttattgtttttggtcttaaattcatttggttctgttctgatttttgtttttttttttcttgtaacttggaatttggtttgttattaattttctagttccttgaagtgtgatgtcaagtccttaatatgtaagctttctacttttttgatgcaggcatttaggctataaactgctctctttgtactatatttgcatatctcacaggttttattatattgcatttctatttccatcttttttcccacaatttttaaattttcattttaattttctttttgagatgggttttactctgtcacccaggctggagtgtagtagcacaatcttggctcactgcaacctctgccttccaggctaaagcgatctttttatttcagcctcccgagtggctaagactataggtgtgcaccaccacatttagcttttttaatatgtattttttgtagagatggggtttgccatgttgcccaggctagtctcaaactcctgacctcaggggatccacctgcctcagcctcccaaagtgctgggattgcagctgtgagccaccacccctggccggccatcttaattacttcatttacaccgtgactgttcaggagtatgttgtttaaattctttgtaaatttatagtttctgaaatttctcttgatattgatttgtagttttattctcctgtgatctaagtaggtagttgatataattgtgatttatgggggtactttgttgatttgccaatttcctatctcaatggtctctctgatgctgtgagtagaatgttgaatttctccactatcattgtgttactatctctttctataggtttaataatatttctatttaaaatctgggtgctttgatgttgggtgcatagatatttagaattgttatatctttttgctgaaaagatttctttattattggatgattaccttctttaccctttttgttgcactttttatttaaagtgttttatttgatatacatacagatactcctgtttgcttttggtttctgtttctgttgatatctttcctcccttatttttaatctatatgtgtcttacaagtaaggtgagattcttgtaggcaccatagagttggacgattttttcttattcatatcataaatctatacattttgatgaaggatttaattaatttatattcaaggttaattttttctttctttttctttttattttttgagatggagtctcattcttgttgctcaggttggagtgcaatggtgcgatctcggctcactgccacctctgcctcccaagttcaagtgattctcctgcctcagcctattgagtagcggtgattacaagtgcccaccaccgtgcccagctaattttttgtatttttagtagcgatgggttttcacagtgttggccaggctggtctcaaactcctgatctcaggtgatccaccctctttggcctccaaaaggtatgagccacctcacccggccatggttaatattaatattaacatgtaggttttgttactatcataatgttaattattttgttttttttttcatctatctttctggtttaataaaattctgtcatgttgtgatttgatttatttctttttgtcttttgttttataagacctgttagttttatacttttgtatgttttaatgatggtgaatatcaatcttttgtttttctattagaagtaccggcctggcacaatggctcatgcctgaaatctcagcactttgggagactgaggtgggttgatcacctgaggtcaggagtttgagactagcctggccaacatggtgaaactccgtctctactaaaaattcaaaaattagctgggtgaggtggcgggtgcctgtactttcagctacttgggaggctgaggcaggagaatcacttgaacctggaaggcagaggttgcagtgagccgagattgtgccattgcactccagcctgggcaacaagagcaaaactgtctcagaaaaaaaaaaaaaaaaaaaaaaaagaaatccctgacatcttttatagacccagtctagtggtaattagtttccccagcatttatttgtcagggtaagactatttcttcttcatttgtgaaggttaatttaccttgatgtaaaatttttggctggcacttttatttcaacactctctaagtgccattccattatcttctggccagtaaagtttctgttgagaagtgtgcttttagtctgatgtggttttctttataaatgactagatgcttttcttttgctgattttataattagttatttcatttcgactttagaaattctggttatcatgtgccatgatgaagtctgttttgcaatttattttactggtgattgctgagcttcctgtatatgtatgtctaattctattgctagacttggaaatttttcatcatttattttcttaaataggttttctaaactttttcatgtttttttctttctaagaaacactgataatttttatgtttagtcactttatgtagtcagaaacatctcaaagttttcgttcgttttttaaaattcttcttagttttgtctgagtagattattttaaaagacccatttaaaggtctgaaaattctgtttatgccttttcagtctactattggatcattgaatgtattttctttttccttcagtaaatctttcagttccataattttgttttggtttcttttaaaagatatttatctccttggcacatttcccattcatactctaaatttatttatttatttttgtattggtttttagatttcttttgcatctctttgagcttctttaaaatctatattttgaagccttctaaaagtcttttaaagtcctttcaattattttttttttcttggaatactggagaattattgtgttcctttgaaagtgtcataaaccttgcttttctgtgttttctctgtctttatgtgtctttatattgatttctgcacatctggagaaacagttgtttcatttttttaaatttacattcactggaggaagcttttttttttgttttttgaagttattaccatgatgtttatcacatagaaccatttggctttaattttggatttgtgcagagggaaagactggataagtttcttgagtataaacaaatatatacacacacacacacacacacagaaacatgtttctgtgtgtgtgtgtatatatacacacacatatatatatatatatatatcacaaattttggcttaggagtcatcttttctcttaggttgatttttaattctaactcccagaaaacaattaatttatctttgttttatttgtcattgaggcccagcaaacctgaagtaaaagggtgagaaggtagggtgggtgctggataatgagaaattacttaagggttataatgtaaattatttgaatgatggataccctaaaagccctgacttcgccactatgcagtctatgcatgtaactaaattacatttgtacacaacacttttgtaaaaataaattaaaaagaacaactagagtttgctatcttgcttattcatacatacaaatacatcataaatgtttcccatgacattattattgatacaggagttaaaaagaaattatttaggcagatagtgagtgagggcaagaaagtccttcgtaaagctttccttttaataaaaagcagcccacaaattatttcttttttaacaaagaacagcctgtaaaatcaagctccaaacatcgataagcaagctgaaagcttgcatgaataaatgtcggcagctgtgccaataggaaaagggactaactgcggacggcgcatgtttaaaatggtgacaccctcttcccatttccttgttaaccacatgtacagtaagaagcaggcaacagggtgctggcaaatgctccatttgcataatagaagattagggtggagcagccagattccttgtgtgctgtgtaaactttctttattttattttattttattattatacattaacgtttagggtacatgtgcacaatgtgcaggttagttacatatgtatacatgtgccatgctggtgtgctgcacccattaactcgttatttagcattaggtatatctcctaatgctatcccttccccctcccccaagccacaacagtccccagagtttgatgttccccttcttgtgtccatgtgttctcattgttcgatttccacctatgaatgagaacatgtggtgtttggttttttgtccttacgatagtttactgagaatgatgatttccaatttcatccgtgtccctacaaaggacatgaactcatcatttttgatggctgcatagtattccatggtgtatatgtgccacattttcttaatccagtctatcactgttggacatttgggctggttccaagtcgttgctattgtgaatagtgctgcaataaacatacgtgtgcatgtgtctttataggagcatgatttatagtcctttgggtatctacccagtaatgggatggctgggtcaaatggtatttctagttctagatccctgaggaatcgccacactgacttccacaatggttgaactagttgacagtcccaccaacagtgtaaaagtgttcctatttctccacatcctctccagcacctgttctttcctgactttttaatgatcgccattctaactggtgtgagatggtatctcactgtggttttgatttgcatttctttgatggccagtgatggtgagcattttttcatgtgtcttttggctgcataaatgtcttgttttgagaagtgtctgttcacatcctttgcccactttttgatggggttgttgttttctggtaaatttgtttgagttcattgtagattctgtatattagccctttgtcagatgagtaggttgcgaaaattttctcccattttgtaggttgcctgttgactctgatggtaatttctttagctgtgcagaagctctttagtttaattagatcccatttctcaattttggcttttattgccattgcttttggtgttttagacatgaagtccttgcccatgcctatgtcctgaatggtaatgcctaggttttcttctagggtttttatggttttaggtctaacgtttaaattgttaatccattttcaattaattttctataaggtgtaaggaagggatccagtttcagctttctacatatggctagccagttttcccagcaccatttattaaacagggaatcctttccccattgcttatttttctcaggtttgccaaagatcagatagttgtagctatgcggcattatttctgagggctctgttctgttccattgatctatatctctgttttggtaccagtaccatgctgttttggttactgtagccttgtagtatagtatgaagtcaggtagcatgatgcctccagctttgttcttttggcttaggattgagttggcgatgtggcctcttttttggttccatgtgaactttaaagtagttttttccaattctctgaagaaagtcattggtagcttgatggggttggcattgaatctataaattaccttgggcagtatggccattttcatgatattgattcttcgtatccatgagcatggaatgttcttcccttttttgtatcctcctttatttcattgagcagtggtttgtagttctccttgaagaggtccttcacgtcccttgtaagttggattcctaggtattttattctctttgaagcaattgtgaatgggagttcatgcatgatttggctctctgtctgttgttggtgtataagaatgcttgtgatttttgtacattgattttgtatcctgagacattgctgaagttgcttatcagcttaaggagattttgggctgagacaatggggttttctaggtatacaatcatgtcatctgcaaacagggacaatttgacttcctcttttcctaattgaataccctttatttccttctcctgcctaattgccctggccagaacttccaacactatgttgaataggggtgttgagagagtgcatccctgtcttgtgccagttttcaaagggaatgcttccagtttttgcccattcagtatgatattggctgtgggtttgtcatagatagctcttattattttgagatacgtcacatcaatacctaatttattgagagtttttagcatgaagttttgttgaattttgtcaaaggccttttctgcagctattgagataatcatgtggtttttgtctttggttctgtttatatgctggattacatttattgatttgtgtatattgagccagccttgcatcccagggatgaagcccacttgatcatggtggataagctttttgatgcgctgctggattcggtttgccagtattttattgaggatttttgcattgatgttcatcaagaatatttgtctaaaattctcttttttggttgtgtctctgcccggctttggtatcaggatgatgctggcctcataaaatgagttagggaggattccctctttttctattgattggaatagtttcagaaggaatggtaccagttcttccttgtacctctggtagaattcggctgtgaatccatgtggtcctggactctttttgttggtaagctgttgattattgccacaatttcggagcctgttattggtctatccagagattcaacttcttcctggtttagtcttgggagggtgtatgtgtcgaggaatttatccatttcttctagattttcttctacatttatccatttcttctagatttctagtttatttgcatagaggtgtttttagtattctctgatggtagtttgtatttctgtggaatcggtgttgatatcccctttatcattttttattgcatctgtttgattcttctctcttttctttattagtcttgctagcggtctatcaattttgttgatgctttcaaaaaaccagctcctggattctttaatttttctgaagggtttcttgtgtctctatttccttcagttctgctctgattttagttatttcttgccttctgctagcttttgaatgtgtttgctcttgcttttctagttctttcaattgtgatattaggccgtcaatttttgttatttcttgctttctcttgtgggcatttagtgatataaatttccctctacacactgctttgaatgtgtcccagagattctggtatgttgtgtctttgttctcgttggtttcaaagaacttctttatttctgccttcatttcgttatgtccccagtagtcattcaggagcaggttgttcggtttccatgtagttgagtggttttgagtgagtttcttgatcctgagttctagtttgattgcactgtggtctgagagacagtttgttataatttctgttcttttacatttgctgaggagagctttacttccaactatgtggccaattttgggataggtgtggtgtggtgctgaaaaaaatgtatattctgttgatttggggtggagagttccgtagatgtctattagatccacttggtgcagagctgagttcaattcctgggtatccttgttaactttctgtctcgttgatctgtctaatgttgacaatggggtgttaacgtctcccattattatagtgtgggagtcaaagtctctttgtaggtctctctggacttgttttatgagtctgggtgctcctgtattgggtgcatatatatttaggatagttagctcttcttgttgaattgatccctttaacattatgtaatggccttctttgtctcttttgttctttgttggtttaaagtctgttttatcagagactaggattgcaacccctgcctttttttgttttccatttgcttggtagatcttcctccatccttttattttgagcctatgtgtgtctctgcacatgagatgggtttcctgaatacagcacactgatgggtcttgactctttatccaatttgccagtctctgtcttttaattggagcatttagtccgtttacatttaaaattaatatttttatgtgtgaatttgatcctgtcattatgatgttagctggttattttgctcgttagttgatgcagtgtctttgtagcttcgacagtctttacaatttggtgtgattttgcagtggctgataccggtttttcctttccatgtttagtgcttccttcaggagctcttttagggcaggcctggtggtgacaaaatctctcagcatttgcttgtctgtaaagtgttttatttctccttcacttatgaagcttagtttgggtggatatgaaattctgggttgaaaattcttttctttaagaatgttgaatattggctcccactctcttctggcttgtagagtttctgctgacaggtccgctgttagtctgatgggcttccctttgtggctaatctgacctttctctctggctgtccttaacattttttccttcatttcaattttggtgaatctgacaattatgtgtcttggagttgctctttttgaggagtatctttgtggcgttctctgtatttcctgaatctgaatgttggcctgccttacttgattggggaagttctcctggataatatcctgcagagtgttttccaacttggttccattctccccgtcactttcaggtacaccaatcagacgtagatttggccttttcacatagtcccatatttcttggaggcttttttcatttctttttattcttttttctctaaacttcccttctcgcttcatttcattcatttcatcttccatcactgataccctttcttccagttgattgcattggttcctgaggcttctgcattcttcacgtagttctggagccttggctttcagctgcatcagctcctttaagcagttctctgtattggttattctagttgtacattcgtctaaatttttttcaaagtttttaacttctttgcctttggtttgaatttcctcctgtagctgagagtagtttgatcatctgaagccttcttctctcaactcctgaaagtcattctctgtccagctttgtttcattgctggtgaggaactgcgttcctttggaggaggagaggccctctgctttttagagtttccagtttttctgctctgttttttctgcatctttgtggttttatcttcttttggtctttgatgatggtgttgtacatatgggtttttggtgtgtatgtcctttctgcttgttagttttccttctaacaggcaggaccctcagctgcagatctgttggagttttctagaggttcactccagaccctttttgcctgggtatcagcagcgatggctgcagaacagctgatttttgtgaaccgcgaatgctactgtctgatcgttcttctggaaattttgtctcagaggagtacccggctgtgtgaggtgtcagtctgcccctactggggggtgcctcccagttaggctgcttggggttcaggggtcaggaacccacttgaggaggcagtctgcctgttctcagatctccagctgtgtgctgggagaaccactgctctcttcaaagctgtcagacagggatatttaagtctgcagaagttactgctgtctttttgtttgtctgtgccctgcccctagaggtggagtctacagaggcaggcaggcctccttgagctttggtgggctccacccagttggagcttcccatctgctttgtttacctaagcaagcctgggcaatggcaggcgcccctcccccagcctcgctgccaccttgcagtttgatctcagactgctgtgctagcaatcagcgaggctccatgggcgtaggaccctccgagccaggtgcaggatataatctgctggtgtgacatttttaagcctgttggaaaagcacagtattagagtgggagtgacccgactttccaggtgccatctgtcacccctttctttgacttggaaagggaagtccctgaccccttgtgcttcctgagtgaggcaatgcctcaccctgcttcagctcgcacatggtgtgctgaacccactgtcctgcgcccactgtctggcactctctagtgaggtgaactcagtacctcagatggaaatgcagaaatcacctgtcttctgcgtcactcatgctgggagctgtagtccagagctcttcctatttggccttctcagctgcccgcctcagctgtgtaaactttcaaacctgatccaaccaatgtttgggccctatgtaaaccagccacctgctcctgaagccagtgtgtaaaatccattgcgcttcactgcaggctggaagtcccactgagaggcactgctctttctcagaagagaagactattctcctttctctttcttttgcctattaaaccactgctcctaaaccatcttcttgtgtgtccatgcactgatttccttggcattagatgacgaacctcgggtctttaccccacacaggtgatgccacttcagtatgttaaaactcattaatttattagttaaaattgctttattaataaatatagcactttttttttttgagacggagtctcactctgtcacccaggctggagtgcagtgacgtgatctcagcttactgcaacctccacctccctggttcaagcgattctactgtctcggcctcctgagtagctgggagtacaggcgtgtgccgccacgtccggctaatgttttctatttttagtagagacagggtttcatcgtgttagccaggatggtcttgatctcctgaccttgtaatccacctgacttgacctcccaaagtgctgggattgcaggcgggagacaccacgcatggcaaaatatagcacattttaaagaccactgatgcacagtgcaaaaactgccatatatgaatatgacatcaaattatacttccagtaacagtgttaggaaaggtcttgttaccctacactaactatttatgaatagtttaatggaatatgctgttttaaaaaatattttccattttggtatgtgaaaaaatggcatctcattatttatttatttatttatttatttatttatttatttatttatttttgagatagagtctcgctctgttggccaggctggagtgcagtggcatgatcttggctcactgaaacctctgtctcccgggctcaagcaattctcctgtctcagcatccctagtagctgtgattataggtgtgtgccaccacgcctggccaatttttgtatttctagtagagacaggtttacatcattttggccagggtagtctcaaattcctgaccttggcctcccaaagtactgggattacaggtatgagccaccgcgcttggtgacatctcattattttaatatgaattttagtaactattaggtaacttgtttttatatatgtttagtgtactactttttgaattgcctagtcatggcttctgcttattttgctattaaattatttaactttttactgatttatataagcttttgctatccacattatagtaataagttgtctaaaattattttacatgtatcttcattcagctcccagagtccatcttcaatgcttttgatagaaaaggagttcctcccttctaaagatgtctactcttagtttaaatatgtaccaattagtaatacacaattagggaagtttaaacactgtctaattaaatttgatttggggaaaataaatgttctcacctttccatttttatttaaccatgtgtaagaaggcagcctatacattctggggtaaaaagtctctttttaaaaagagaaaatgtattctatcaaagagggtaccaaattccaagtttgcactgcactttgctgaacaccttgtattttttcaagcttaaactttctaaaaggttagcagtattctctgtgaaacacagagctgctcacattgcagccctgctccaaaacatttggtggttcataacagcctgcaaagctgagcccccatccatgtttctaaggccaacatctcttaacatcccaaatctatacgacactcccaaagtatattcttttgtcaaactccacttcttgtcctaccctgtccttaaataagcctcatatttttatacttcatgtcctgtacttaaactgcttttttgcctagatgtacatttttcttttcccacattcttcttctccacatggaaaacgtgcacatttgtgagtatcacctttactctctactgcaacttctcacttgccagttctccacttgttcttgctggttgtaaggcactgatgaattttagaactggaaccatattatatccatctttgcagttctagagcctggtatcaggtgtaggtgtcaagaaatggttcccaatggaagcttgctgatagtgatcttcaacagatgagacaagaaaggagccagaatgctgatttactaatccagattactttccactattgttttgctgaaactctccaatgtcatgagaaaaataacaatgataataataatactagtagcaaatacagaagataagtcagttaaaattgagctggtagcatgcataacttcaattctgtatttattactggtttcaaaatattccttatccacaaattggaagaaacaggaaacagaccctcaagtgtctttcacaatgcaagacctgccaatttcataacttgctcagccaccctcataaaagaaactaggcacactggtgaccccatctcacacacactcaaaggagacagaaggtcttcctctcactgtcctccagtacatgtggctcctccttcttaaaaagcaaaacaacaaagaaataatacctcccagagggtatgacacttgaacttggacaagtgtttttttttttgttgtttttttttaagatggaatctcgctctgttgcccaggctggagtgcagtggtgggatcttggctcactgcaaggttcgcccacgccaattctcctgccttagcctcccgagtagctgggactacaggcgcctgccataacgcctggctaattttttagtatttttagtagagaccaggtttcaccgtgttagccaggatggtctcgatctcctgacctcgtgatccacctgcctcagcctcccaaagtgctgggattacagacgtgagccactgtgcccggcctgatcttcaagtttttagattcgattagtaatcaagtcaattcaatttttgcccttacttggctcatatcacatattatggacctcttaggatcactctatgcaaattctgaggcaaaaccttgagtttccatattatgtaaaataacagtaacctgttatgaaacaacagtagagctgttcttaaggcattgaccctgcccaaagcacaacttaatttcccaaacagttatgagtttagtttcaaaatctcttcaaaaataggcttcatatgagtctttgaacagggctcagcactttcagtgaggttaaaagtgggtgtccacaaggaaggtttcaagagataagaaagccccccattaatcaccacacagaggactagcagaatcatagagtccatgcccaccctttttcacttctagaatatctcccaccatgtgaaaaaccacctctcttccacatgctatccttttcaatgagaacatggtaaacatttcatcctcagcaggatttgttcagggtttcactctactttcccactgggtctcagtctgccagctttctgctttagtgtctttttgaactccccctctttaagggcacagaaatcctcatcagtcagttcatctactaatatgacctctgcaagcccctcactctacaaaacaccattcctgaccatcacagaagggaaggtctaacttatgtggtcaaatattagctaaaatgtgttgttcaataggtaagctgtaatttaattctggaaaccagacccctgtcctggcacacttacactttttccttggtgtgccaatcttttcccttgatgtgcctaatagggaggactctgaacacaggaggttttcagttagtatttgtttggtgaatggatcatgtctctatggtaggtagtctggcatgggtcaggagcacagccctggagacaaacttaatagtttgagttctaatagctggctgcctctctgggtctttatatcctcatctgaatcctgaggataataattacatctacacctctctgtcgaagaattgtgatgaatgaaaaagatgatgcataaagaaaaattaggatgctggtagctagctctcagtaattgttagatctgatgacatttgctcctactgctatcaagctgagtgtgtttctatgtataaaagctaacaaccaacaagctgagtgtgtttctatgtataaaaactaacaaccaacaaagggtgaaaattaaagtaaaacttgattgttaacttgtcagactggagtcctatggattaacaggtctagcacaggtagaagagaaagaaatacttaacttctggtttatttgatttaatgcaaatacaggaaaacctggataagaaatgcttttcaccaaagtttgtctgcaacttgaatgctgtaggttaaactaatttaaaagtactctagacagattcatttgtaatataagcatgtcatagtttctggtgtttaggactggatttatgtttatttagttttctgaagagacacaagagacagcccaagctgctatcggaattcctagagacaagttgggcaaatgagcccttacaaaattccatttatggtaaagataataatgaaataaataattactgagaccagctccatcagcgagaccctaacccagcagtgctagaggaattaaagacacactcacagaaggtgtgaagtgggaaatcggggtctcacagccttcagagctgagagcctcgaacagagatttacccacatatttattaacagcaagccaatcattagcattgtttctatagatattagattaactaaaagtatcccttatgagaaatgaagggatgggtcaaaataaagagatgggttgggctacgtatctgcagcaggagcatgtccttaaggcacagattgctcatgctgttgtttgtgggttttttttttaagagacagaaaaattttattaatgagtatgcatacaaataaacctagacaaccatgaagagtccctcacagtttcatgtattcacaatattatttcatctctaaagccatcagtgaacgactagttctgctacttgttaaagttgtgcaaaaattctcaatttaaacatacagtcttaattataccagtgttctaatgtcccaagactgattgtaggtaatggaatctcaacaatatcttaaataataatttaaaaaactcaatatgatctacaagactaatatatttaaaggaaaataattcacattcactaaattcctcccctttcttccttcttccctattctccctttcacttgccaatttttttctacagtatatgatgatggccaaattacccaatatcaactgtttcaaaaaagaaatgttattttagaagataccatacagcaagagacttataggtgtaacaccactgaaattatttactaagccctggccgggcatggtggcttacacctgcaattccaatactttgggaggttgagcaggcagatcacttgaggtcaggagttcaagaccaccctgggcaacatggtggaaccctgtctctactaaaaatacaaaaattaagtggacatggtggctatcccagctactcaggaggctgaggcaggagaactgcttgagcccgggaggcggaggttgcagtgagccaagattgtgccactacattctagcctggatgacagaaccagactctgtctcaaaagaaaaaaaaattatttaccaagctgtgttttcatagtgttttttaattctctgaactgcttcagtatctgcagtgttttttttacatttcaaagacttcccacatgtaacatttcattggaattaccactttacatcatagttgatatggaaattattacatctaacagatgaagaaaatgtagacataaagaaccattcgctctaatgtcatccagtgtaactgctaagagttaggattagactcaagtcctattcctaatcctgtatactaccctaaactcctaagcccccatacattgtacttcacagaatgctactagtgactgtgctcatgcattcaaacaagttttggaaatgttgtgttaagcaaagctaaccagattcccagagtctttattatgcatcataaatccccaggaaagatccagagtatagagcaggtgccataaagttaaaagtcccacaagtttcaagcaggtaacaaaggtgagcatgcaagggaaagtaaggacttggggattagaggatgcatccccatctagtggaagcctggtcacatagcaatccagcccaatcttgctgggtctttccagagaagctataaatcttggctttaatttcaaatctccagttttgtgcgtattgcctcaaatttaagaaaaaaaggcactatagtttaaaacaaataaaatttttgaccagatcgggccagccacatttgggaaaactgaaataccatgtatcataatctcatttgcccacagaattttccttcaaaggacttatacatttcctagaatgataacggtgttaaaaaatgttgcctctggctgggcgcagtggctcatgcctgtaatcccaacacttttgggaggtcaaggcaggtggctttcctgaggtcaggagttggagaccagcctggccaacatggtgaaaccccatctccactaaaaataaaaaataagctgggtgtggtggtgggcatctgtaatcccagctactcaggaggctgaggcaggagaatcacttgaacccgggaggcggaggttgcagtgagccaagattgtgccattgcatttcagcctgacaagagcaaaactacatctcaaaaaaacagaaatgaaaacaaacgttttcctctgaaagcaagcatcctgttaccccagacaactatggtatgggtagctctgaacctcaaccatgaattatttcagagttttttcaaactgaaattgaaattaatgcccagccttaactgttcatgtagaaatatttcttttctgacaaatctagctcttgcaaatctatgcttagtagagacggggtttctccatgttggtcaggctgttctcaaactcctgacctctagtgatccacccgcctcagccttccaaagtgctgggattagagcataagccaccatgcctggctggcaaatatatacttctaaacaattatgctgctttagtataattgttttttatatatttttgtactgattaaagatatccttacaataagtctaattgaattataaaaaaaaaattacaggaattgactagatatgagaaggacactttgcctttccaaaacaattttatctttctttttttttcttaaaattttttcttaatagagatggggtcttgccaagttgcccaggctggtctgaaatttctgggctcaagctatctgcacaccttgtcttcccaaagtgctgggattacaggcatgagtcatggcactagcctccaaatcaattttaaacataaaagtggtttggagacgatttagaatttgggtcaaaactagtgagtttcaaacacttatatctgcaatgtaacttataagtcagaaaaggcagccttttccctaccgcagcctttttttttctctcttttatttctgaccttcttggttctaaaaatttgttcagaaatcctgatggttgtttaaatgcttagcaccatgacacacatgtaatacaaattgcataaatggacggggcgtggtggctcatgcctgtgatcccagtaccctggaaggccaaggcaactggatcacctgaggtcaggagttcgagatcattctgtccaacatggtgaaaccctgtatctaccaaaaaaatacaaaaaattagctgagcatagtggcagacacctgtaatcccagctcgtgaggctgaggcaggagaatcgcttgaacccgggaggtggaggttacagtgagatgagatttcaccattgcaatccagcctgggcaacaagagcaaagctccatctcaaaaaaaaaaataatgtataaatatgttgaatcacctggcaaatgattttcttcccctggtgtctatgtgttccatactattgtagcctcttttaactggtaaaataactaccccaattcagagatccagtacttaatgcatcacatttccagagtcgtgagaaaacagctaaacctgttagagtgaattatactcactttgtttccccatagaggaaataaaacccacgattagaaacctttggaaaacataggaaatgcaacatttggaagtatatagaaacaagagataatcatgcaatgcttccaaatgaagtctcacattggatttgctgattttggagacagattcccctcttctggacagctttgatggccaagatagaagttcatttgctatgtttccagggactattctctttgatggatacaggatttatggggtctaaagagaacatacaattctaaagtgttcatgtttgagagaaaactctgcaatgatcagaaggattgagccagttttagcaaaacaaattaggactacattaatgatgaggttgactatacacagtttggagtgggagagttactctacccagtatcactgacatgttggaatgccagatgaaactgaaacagaaaaattgtcttggagtctaaaagacatctgatgtgctgatacctgttcagtcttctgcagtcatgggcgtaaactctcaaagagcaccactgggtcttagtccgtggcataaacattattctcaatgtagatattgtcttctgcttggacttcctttttaactgcattttgcaaagctttagtttgaagactgctaaatgaaacacttagttgttgagtctcctctttgaagaaatactttttggcaatgatgacacccaaaagagcaagaagcaccaagacagaaatacagactccagcacagattcctttagtggtgttgaccatctgtggactatatgctggggacagttgagtttgattgttattccaaaggccatctgaagactctgtcatggtgtcattcccatctgttgtgaaagagtgcaatggtgagctggtgggttgtgtccttatttctccctgaagtgtcatagggtgggtttctgctggctgaggtgaagatggtgaagtggctactgattgatggttctgcgtgggcaatggcgttggaggaacaaaggtagagaccattgttgtcattggaacacttgttttcattgaaatgctcgttgttgttggaacagtctttgtcgttggaacagttgttgtcgttggaacgcttgttgtcattggaacagtgatgctcgttcaaacagtagtggcggttggaacagttgtgacaattggtgtagtcgtgaccctgggtggcacaatctccaatgatagagtgattttcatgtcattgaaccacccactgtgctcaacatggcaacaatataagccactgtcagacacagctgtattttctatagtcaaagggacatcccttcttgaaaggtcccccaataccttatagtgtgtgtccttccgataggtgacgtgggttccattggtccagacaatgctatttcagcatgtgaataaagaacgtgcgcctctattccagcacatggatgtgacagctccattgtagtggcagggtagcgtgatagacggacctgccattccaccaacctttacagaaccagctacagaatctgccagatgtaggatgaggcttaagatggccacttcaggatacattatgggatcagccagttagttagaaggcagttttccagcttcttctccctcctcctagtctctgtttgtggacggctttaaatggttttccaccctgggtgggccaggtgttccttgccctcattctggtaaatgcacaacctcccagcatgggcattatggccatcatgtacatgtcacagtgctgcaaagattttgtttatggccagttttggggccagtttatggccagattttgggaggcctgttcccaacaaataataatctctgaacataagaatttgactagtgttaatcactccacttctccagtacactgatacttctccctttttcttagcataacacaaaacagatacatgactacacaccatctgctctccagtgcggaacagaggaacaaaggcataagcaagcttcagaacacagtcagccatgttcaccacatctatatctagcactgcttaaaacaaagtcaatgagaaactgagaagatgagtgactaccctattttcagcacttattgtcacaagaaaagaaaacatgcccacacactgtctccttctaaggcacagcatccactttcctgaggaaaaagtaactttacagcatatatctcaatctcacattattagcaagatgacactggctttgagcacacaaagaacaggcatattatagacactcttaagacacatcacatggcctggcttacctgatacaatttttaatttctctgaagtaaactcaaatttcaaacatgtatttctttattaacttatttcattaatttccacagggacttcacagaaagtatattcaactttcattcacttaatcttaccacaatagatggtgtaacatatccagaagacagccatatgtaagacatgctcataccccaaagcatagaaaacttaacacaacagggccttgaggaagcaacactataacagtgcaaatatacaaatatttaagaaaacctacatcacccaacaaagagcatgtatggtcaccactacccagcactctccaaaataagtagctatgaatagcttattcaaatttggcttatatatacttgtcaccacaaattggttctgaacatactgttccaattttggatattcacaacaagggtaattatctggtaagatatatttataataacttgtaattagattcctaaatgcacacatatacttgtgtcacagtgaggtgaaaaaaactctgagttatttgtagagtaccttaagatttaaatttccaaaaaacattcttaagcttagttttacaagtattccacccagcatctcttcagcaagctatttcaattttaaaaagtgaggactagggagggcttttaaaagttttatttctttctgttcagtttatcttatcccatacagaaatggaataaagtgtgatgtctgtcctaatgatatttatggttgtggtaatacagaaatatctatgcttccaagcaagaaatgaaaaattatggtttccccaaaatagagaaaccagtgctacctggggcccaaagagatgttcaggttacatctgtcagaattgataccatgcaagacaaccatctttggagaacagtggggctcacctgagattttggtgagtcatgtggatgacatcagagacaagcattacacaaaatgagcatcccaataagactttcatgtgagattgtcttagaagatggtggcccaactcacacagaagaggacggctgtgcatccaagagagactgatattttttctcaggagcagaaatcttaatgtaggagatggccactcactgagtagttgaggaatgccctgatggaactctctgggggtcagatttcacactgtctccctgagttgcataaagcacagaacagcatgcctgcactccagcttctagcatgtaccaactcagcagaaaacacatcactgtctattttgtttcaaaaatgctttgccatttaaaaaaagttaattaatatagtagaaacccaagaactacctaggggtagggagcatgtctgtcatcagaagtttttaaatgctggctagacaaacactctgtggaaataaatttcactctttgtgagaggggtaaaataaatctttttcttgggcactgacagatctagccaagatcctagtatacagcagataaacagcaacttctgtttactaaactttattttcacagattactggtgaagcaaaatattgatataactctaagacatgaagggtatcacaagaccactcatgttctttatgtggtttcaattaagaaatgaggtgaaaaatctggccatgaaatgagttttgatgctcctaagtagcatcagaactgctctgatgtgcttaagccattgtgacagtcctagctttgttcctacccaaagtctcttctcatgaatcctaggcttactggtcaaacagataaagcatccgtaaatcaaacacaaacttcaacgctcttaacatgtaggtgtacatctcatctgaaaatcattcaaaagctcaagccatctacaagaaatctttcctttgcattttagtatcaataaaaggaaagaaggaaaagaataggagaaagccatttaataattttcataggtaaaaatgtaacattggtttctcagttacataagtacttttcttgcttcatccatgacatacataatttttaaccaactaaaacacattacaagtagagaaatagctaaaatcatggaaagcatacacataactcttcaaagagtaggaaacattccctgttcatatgcattgcttaatccagcattccaatctcactgaggcaccagcatccacgctgttctctgaagcattctttttcctcctgtcacccatccttcagatattagctcaaatatcacttccatgggtcaccttccttaacctgcatcccggcatcctccattcctctcccatacaaaaaggccaaactttatgttggggtgatcagacccaacaccacatcgttggggtgacaaagtccgggggagtcaaaggattgagaaaaagacagagagaaaaaagtgggacaccagggggccatcattatcatggaggctgcaaaggcactgagctctgggagcccatggtattttttggtaatccagcaaagaaacaggtggtgagaatgtgggggtcaaaagagcaggcacatgatctacagctgtgacggtttagcatttatatggaacatgttctgctacttgagataatgggaataggggcctaggaaggctagaaacaaggagccagcaagtctagacacattccagaggacattatgcaagccctgtctcagtttccctcccaacacagctttttcccaacatgcccccttatcttttttgtaaaagagaaggtatcattattactagctatcattattactagcataaaaagtgccctcttttaattgagcaaggcgattgcaggctttgcagcccttaattgatggtgggtgatccagctttatttttcttagcctttattcaaactggagtcgctctggtttgaatgcttgccatatagctcccctttcccttttacataaggaccttaaccctaggggttgcagaaggatgaaggtccatcttctgtaacttcatgctgaatagaggtgatgatattcctgcctaactattagcatttcttgtattcacgacagagaggagctgagtcagaaagcattggtccattaagcgtcatgactctggtcggtcctcgttccatcttctcattcagattcgattgtctcatggctcatactggggaaacccgttccatggttggtatccatgtgtccctccagtctcccattccatggtcgtacacatcttgagggtgtccacatggtttgttcatctcctgcaaaaacaaaagcataccctcacccccacgttagtaaatctactgaaacagaagcaaaaattttgtggctgtagccaggaggccactgataatgagaaacaggctttttctgattaacagaaggtatagagaaagcaaatcgagacttttcaaaccttcaattctcactgtacaggtgggtccactagatgctgtggcttatgatagatcttcagatatttggtgggcacccacataggcacctgattgtcacctggagagacacaagcaaatccccttccccataaaattatctttaggcagggatcggaggaagtagactcagaggtaaggagaattttggggcctaatggcttcctgatgtttgataggtgttcctttggaagttaggaattccctttccatattgctgtgtgggcatggaggtctagctaagcataaagtttgtacatatatttaccctttttcattctcctaattctagtgtataatggctcctgcttttgctaggatgtctctccctaacaaaggtgtggggctttcaggcataattaaaaaggcttgtgaaaagagtcaagttccccagtcacaacttagtggctgggagaagtatctagtgactgcctgttctaggaccccttggatagtgacacatctggaggacagttgtccaggacaggagaataagactgagaagtccacacaagtgtccaagagacagttagcctcctggacctcaatggccaagcatacctggggagggtgatggcgtgggctggtgcttgccctgggcaccctcattcctgctgctggataatttggttagggcttctgacgcagaggacctttgtcccctggggcagtgggccttccagtgattcccttgacataaggggcatggacaaggaggtggcttatttctattcggacaatctttttaaaagggtccttgcagaccacactggaagcaagccctattaagcatttgattttcccagcctttcccttttccagagcctccaaagtctgcttgcctgagggtcatgactaaagctatggccttttctcgttgttgttagtttgtcccattctgcctgctcctcctgatctatagtataaaaaaaaacaaaaacaaaaacactgaggttgccaagttcaatagggtttctaagttttgttccgggcctaaggcggacttttgaagttttttctaaagcctgcagctgactgagtgataaacttgtcctttaagattagttggccttcaatagagtcaggtgacagagaggtatgctttctcaatgccaccctttgtctctccagaaaggcagtggggttttattcctttccctgtgttatagtggacatcattgaatactttataggcttcttcctagttttcctcagtccttctagcatgcaagttagcaaatgtctgtggcaccaatctccatgttctgatcctgcatcccaatgaaggtctacactgggaacttcctactggcctgtggggaattgttctctttcctctgttgtcatcctatcattgacctgactgagataccagagatcaccaaactctcgggctgcagttatggtggattagtgtctgatctagctgtaacatttatatctcactatgtcagatcaaaggattgtcctaacccttgtaaaacatcatggttatctgagaatttacctaggtctattttaatttgtttcaagtctgacaggaaaaaagttacataaactctgactgggctgaattctccagaatatatcttaggggtgtttttgccttggggagaacatttcccatctgaaaaaaagaacatagagatgacagaacccctagtcactttccactgagcattagtcctagagcatcctctatgtcctaatgcttattcctttccagggtgcataatacccatggacttctgcttattggattagttatgttcaccgatgtagcagtcctgcatctgttttctcacctttcttgaccacagagaaaggggtctgggctgctggattccagtggtcctttaccagcatgcccaacattgcctttgcactcaagaggtgagttctagagctgggctgggttcctatttgataacaacccagctgccccatcaagatgcactcccataaacagttcttatgtaaattaatttcagagagggtgtaggtaaacttttgagtcaggattgagataagagttgttttattctgaaagtactttaaggattggctgagtgcaaagagctcgcacgcttgagaggactaattattagataattttcctaactgcttctacaagagtttccctattgttcccccgacccccacctcaatcacccaggaggaaccatctgtcatcctgtcctggagggagttcctcctaggtctggtcagacctttgtatggtaattaagatttaaatacctcattaggaaatctgctgggttaagggaattttcagtggttaatgttaaatcaactttttctaacagaatagccccatactttaagattgagttagtaagctacctttttgctccttttactttggatagctctgaactggtgagatgtgctcacaatgaagtttcttctaaaagttatttttctcttttcttctgttagcaaagcagtggctgctaccgatggaatacatttgggccatctacaggttactggggttaaggattttgataagaaggctactggttgtcagtggtcttagtgcttttaggcaatgcccttgtttacactgacaacaatatagtattggagtgttatagggtcacggagaagaccattagttatcaattataggttttaaatttatcctggcttttaaaggaataagttacactgttttttctttaactacttacatctctctttctcctttgtagatggattttggaaacacagcggaaggacatttgcggtcctccctgctggattaaagttacaggaaattgccatgcttcaaggtcttcatctactctagccttttgaatataattttatatagcaccaccaattgctccaggttttaatgttgcaactacaggagcagtaagtctcatagctaattcatcttctcacccattaaggggagagagaggaggtggccttcacttaattgatcaggtggagccaatgggctagtaaaacatacttttttcagtttccctttcttttaatttctgtttcctgttcctcacattcagaatctgaagttagtttttacactcgtcctcctcttctttatctgaatctgcttcatcatgtgtttgaaatacctcaagagctgcttttattagcacccacattgaacaaaccaagactggaatttttgctccatctttatacactttttaaaaatctctgctaattctctcccattcctccaaagccatagtcccttgttccgggaactatggacaaaactgctttattgcactaaaaagtgagtgataacaaattctgagtactaactttcactccccctcttcgtaataagtgctttaagaaatttaaataagcagaatgctttcacgttgtcccatttttttaccctggttcttccaagccctcaactttcccgccgacgttcttttaaacgtcctcgggttacctttggcgatgcgtcctctgctttcacatgctctagtgttccttcaccggggtctttgtcaccccacattgggcgaccaggaatgttggggtgatcagacccaacaccaggtcatgggagtgacaaagtccagcagagtcaaaggactgagaaaaagactttgagagcgaaaaaggtgggacaccagggggccatcgctaattgaggaggctgcgaaggccctgagctctgggaacccaccgattttattggtaatccaacaaagaaacaggtggtgagaacgtggaggtcaaaagggtgggcccattatctacagttgtgacggtttagcatttatatgtaacatgttctactacttgagataatgggaatggagcctaggaaggctagaagcaaggagccagcaagtctagtcacatttcagaggactttatgcaagtcctgcctcagtttgcctcccaacactcagctttttcccaacaactttacttcttacaacaacttatcatgggaatggtaaatttggtggtgaaaaactgtctcttttctaaaagaaggctaaatctgaatcagaattgtacttaggaaaattaagttgtgaaactttaagaagcttttgaacacaaaatggttcttagaaaacttattttcataatttaaatacacatcaaattcagagaaacacaagttaagcatcctttaagttactcttggtttaaaacttttaagtagaatattttaaccacatacatattcatttaactaaacaaggaggagggcaggacaaaggtcagaccagtggcactgtatggctaaaagatcacacctttcattatactagacagtttttgtctgaggcctggggtcccagaacataaaaatgatcactgtctcctttattgcttccctgtattatccccatccttctcagccagggcagctgactgacatccaccttctcaagaggacatgcaaggacagaagacgtggctcagaaacactgctctatgaaaagggcagatagttatgtaagaattttgtaaaaacatgagtttttaatgaatgcaaaaacatgaactgtcaagcaagtaagagctgttcaaacaatttttttttttttggaggggggagacggagttttgctctcttgttgcccaggctggagtgcagtggtgtgatcttggctcactgcaacctcttcctcctgggttcaagcaattctcctccctcagcctcctgagtagctgggattacaggcgcatgccaccacggccagctaattttttgtatttttagtaaagacgaggtttcatcatgttggccaggctggtcttgaactcctgacctcaggtgctctacctgtcttggtctcccaaagtgcagggattacaggcatgagtcaccatgcctgtctgtcaaacaattttttaaaaagatatactccacataacttaaaacatgagggagactggcagatgacagcatcagagcgagtttccttaataactgaggaggtgattgggaaaactgagccatctaccaaaatagctttacagaaccaatgcatctcatttgttgtagaagctgatgagttctagagctcttatttactatggagttttcaaatacattgaacaccacttaatgttttcctcaatcccaagcttcttgtaaaactttcacgttgccaaccatggcatcttagaggcaaataaaagcttacctactttatggaatttcagatttctaaaaatagcacatgcaatacaagtcatgcacccagtatgcttgtggatgttttaaaggccactactataccttccaagcaggcttccttgacttcagctctgctgacatctgtggctgttctgtgcattgtaatatgcggagcagcatttctaatgtctgtgcactaaaggccggtagcatccttccccaacacaagacattcaaaattccggaaaggaaatccacagtggatgcccacgaagcttcctaatctcaaaatataacacttgattacatatgtaggttttgagtttctggaacatgtattttatccttacaactatcccatgaggtagaaaatctactgaaaagatgcctatcatcgtagtcagcaatgacaatgccaccaaaggctaaagtttcattttaaattcctttataccttcaaattcaataaaattttgaaaaaaagatcttctttattaaaaataacaacacacacacagaggtaaataagcagtatacatttaaagctacattttttttagatcaagttgactctataaagcagtttttccatggagctaggggtagttatgcattgtggatcctgaggttaatttatttccagctctgggcatatcataaagcagctatcaaataggtcaacatacccacccaaccctaatagtgttactctgagtataaacatggaatctttgctgaatggtttcaaaaaagcagggtgaaaataacttagtccaagaagatacatcaaaataaataaggaacatttttaagtaattaaaccaccggaaatatcacacattttatgtaatcttatcccattgtctctgaggaaagggaaaaaagagaaagtacaaagccagctagagaaagacaaatacagcttttaaaagctctaattaaccccactaagaaatttttttggctacctggagtacgcaggcactgtataatgtagggcagttgtccccaacctttttggcactagggtctggttttgcagaagacaggtttttcacatatgtggtgggacggttttcttttggaataattcaagcacactacatttgttgtgcactttctttctattattacattgtaatgtataatgaaataattatgcaactcaccataatgtagaatcagtgagagccctgggattgttctcctgcaactagatgttcccatctggtggtgatgagagacagtaacaaatccttaggcattagattctcataaatagtgtgcaacctacatccctcacatgtgcagttcacaatagggtctgcactcctaggataatctaatgctgccactgatctgtaatatgaacaatggggagtggctgtgaatactgatgaagcttcgctcactcactgttcatctcctgttgtgcagcctggtttataacaggccacagactggtatctgtctgtgccctgggtgttgggggccccgatgtagggcaattacatttattcatttatttattgagtgcaatggcatgatcctggctcactgcaattttcaacttccaggttcaagcaattctcctgcctcagcctccccagtagctgtgattacaggcatgaaccactatgcccggttaattttgtatttttactagagatggagtttcaccatgttggccaggctggtctcaaactcctggcctcaggtaatccactcatctcagcctcccaaaatgctgggattacaggcacaagccaccatgcctggctggcaactacatttattaccatccatttattaccagggcacctatgttgtacagtgcctggcacacaacaggtagccaataaacagctattgatctaatgcaggaataataaagtaaggtttattttttctcctttaacatgctgtagttgtgtcagatgttaataagacctccggagtctgcctgaagtaacataaaacaaaagacccattcatcaaacaatcacctggaccccctaacttgttacaagttaggtatgaatgtaccacctgtaccagcttagtgagatgaatgtttaccatcacataacaaatacttgtttgccacgctaagggcttagagtttgaatttctgatgagaaataaagtggcatgtacaaaaccccagagaatgatattccatatatccataagcatcagtagcatatcttaaaagtctcacacatccagcaaatcctttaaaaacaagatatcctaatatgcagccagtttagcaattttttttttttttcagagtctctctctgtcacccaggctggagtacagtgatgctagatgggctcactgcaagctccgcctcctgggttcacgccattctcctgcctcagcctccctagtagctgggactacaggcgcccgccacaacgcccggctaattttttgcgtgtgtgttttttagtagagacggggtttcactgtgttagccaggatggtctcgatctcctgacctcatgatccgccagcctcggcctcccaaagtgctgggattacaggcgtgagccaccgtgcccggccagcaatatttttaagaatgataagacagtgcagcttcatttacctgaaatggagcacaagttctttttgaaggaattcatacccattcctgcaaaagttctgtggtctcttgaaggtagcacagaactaagcgtttttttgtgtgtgtgtttccaaagaggttttagccaagattttagtctctaacagactccctgattaaaatatggcttagaaactatacctgcctacttgaaaaagcatcaaatctacagaatacttttcacggatgtacaaaaatgaaaacaaaataacattctactttttgcaattcactttttctcaccttccacttctcttaaatatacttcagaatcattatgcacaggtgcagagaccactacatatctaaaaaaggagaaaaccctcaaatatttggggatggactggcaatattgccttgcagaaataattttgtttccttcagacagaaatgtctcactattttcagcattcttacctaacaggcaaattttgtttccattgactttgaaagggctaagcttaaatctaaactcttaaacaagaatgaagtttaaattttttattaatgaaaatcccagacaggtttttccaaatctttatatatttatatataaacgtaacaaatctttatatatttttttgaaaaggtggcttatttttttaattttattattattatactttaagtttcagggtacactgcacagtgtgcaggtttgttacatatgtatatatgtgccatgttggtgtgctgcactcattaactcgtcatttagcattaggtatatctcctaatgctatccctcccccttcccccctctccaccacagtccctggtgtgtgatgttccccttcctgtgtccaagtgttctcactgttcaattcccatctatgagtgagaatatgtggtgtttggttttttgtccttgcaatagtttgctgagaatgatggtttccagcttcatccatgtccctacaaaggacatgaactcataattttttatggctgcatagtattccatggtgtatatgtgccacattttcttaatccagtctatcattgttggacatttgggaagaacctgcattgccaagtcaatcctaagccaaaagaacaaagctggagtcatcacgctacctgacttcaaactatactacaaggctacagtaaccaaaacagcatggtactggtatcaaaacagagatatagaccaatggaacagaacagagacctcagaaataatgccacatatccacaaccatctgatctttgacaaacctgacaaaaacaagaaatggggaaaggattccctatttaataaatgatgctaggaaaacaagctagccatatgtagaaagctgaaacttgatcccttccttacaccttatacaaaaattaattcaaggtggattaaagacttaaacgttagacctaaaaccataaaagccctagaagaaaacctaggcaataccattcaggacataggcatgggcaaggacttcatgtctaaaacaccaaaagcaatggcaacaaaagccaaaattgagaaatgggatctaattaaattaaagagcttctgcacagctaaagaaactaccatcagagtgaacaggcaacctacagaatgggagaaaatttttgcaatctactcatctgataaagagctaatatccagaatctacaatgaactcaaacaaatttacaagtaaaaaagaacaaccccatcaaaaagtgggcaaaggatgtgaacagacacttctcaaaagaagacatttatgcagccaaaaaacacatgaaaaactgctcctcatcactggtcattagagaaatgcaaatcgaaaccataatgagataccatctcacactagttagaatggcgatcattaaaaagtcaggaaacaacaggtgctggagaggatgtggagaaataggaacacttttacactgttggtgggactgtaaactagttcaaccattgtggaagtcagtgtggcaattcctcaggggtctagaactagaaataccatttgacccagccattccattacgggatatatacccaaaggattataaatcatgctgctataaagacacatgcacatgtatgtttattgcagctctattcacaatagcaaagacttggaaccaaatctttatattttttattcacccttctctctctctccacaaccactaacataaccacccacaaaagaagaagacaatcccttcaatgttccccgaatgtgtgctgctgctagctcggaagctctgtagagttttgtaacggagtgtgaactgctggcctggatctcctaaccagtaaggagagagggaggacaaatccgctgagcaggtaaaaattctttcctcctcgttataatctttcatggattcagcactgaggagagtggccagggcatggggcccgtgcaaagtggcccaatggccagcacgttctgcaccgagcagggtccccacgccctgcatatctccgccctgcctggaaaggaagtggtcccgccaggcagtggaatcggccgctgtgccccatcctcactctgggccagggaatgggtcacatcctcgatgtgccctcggcccagaaaacgcgccgcttcgcaaggagggcgtcggcaactggaatgacatcccctactccttagtaaacattagggtcgcagtttcctaacagacatgagtgggatggggagaggggtcccaggcagaggctggtgctgggggcagaggaaaccacagtaggatgagggccggtgtgggaggaggaagggaagccccggaactgctacaaattttttcagcgggagaaggtcctccgcctttttccaggactcacgaggcacctggcaccgagcccccgactcgcacaaggaaggtgaactccacactgatggatccctgtaaaacacgcacctgtccaatggaagggcgaggaacgatcggcgcccccatggcaagtccctgacacccttctttcctgtgtgccttaggtggtagtcggccacaacacaaccgccagccaggaaaaggccagggtgcggggatgcccgctgccccctcgacgccagtgtcctctgcccaggaagatcaaatccgcagagcagggtgcgacaggggcttccaccaaataccttggcgagagcaccccaggaggccacctcacggctggcacccccaatgctttgcggctgcaggggaaagcaggagccctagtttccaggattccctgccagaaagggcctggaaggaccacagaaggaaagttcctcattccacaggggaaggatgccgggagacagagggcagaaagtggtgggcagcgttgggaagatgtttctggcattcaaggcttgcaccttctgagtcctggtggtgctgtagcaaatgaattcaccccgctattccgggaggccaaggcaggtggagcattcgagcccagaaatttcaaatcagcctgggcaacgtggtcagacgccgtcactacaaaaaacatttagtcaggtgtgatgggccacgcctgtattcccagctactcgggaggctgaggtgagaggatctcttgagactacagtgagtcataatcttgtgccactgcacttcagcctaggtgacggagcaagaccctttatcaaaaaataaataaataaacaactatataaataaactcagccacgggggttgggcccgattcctatcctccacaagctaatatagatacacattaggttttgctagtgcagcgctgcagaagctgccactatgtgtgctggatgctgattggcatgaccagtggctctgtaagaggaggagtagcagtggaggagtggagatagaggaagaggaaaaaagaaggggagaagaaaaggagaagaggaaaaggaggagagaaaatgggaggagaaaatgagaagaacaagaggagaggaggagaaaatgagaaaaagatagtaagaatagaggaagtggagaaaaaaaaacatcagaaggggacaatgggaccaggagaagagacgaggaaaaggaagctgggacaacgagaggagaaggaaaagataatgaggaggaggaaaagaggaggactaagaggagaggtggagagaaaaaggagggaaggaggaagaggagtaggagaggaagaggagcaggaggatgggagaagtatgaagagaaaatgaataaggaagcgaaggaggagaggaagagatgagaaggacgagaggaggaggaagaggaaagaagaaagaggagaggaggaaagaagaaagaggagaggaggagcagagaagaggaggaggataaaaaggagaagggtaggagaagagaaggaggagaagagtgagaaaaggaggaagacaggacgaggaggagcagaggaggaagtaaagagggaagaaggagagaaggagaagaagagacaggaaaaggggaggaggaggggagggggagaagaagacgagaaggaggaggagaggaaaaggagaagcaggaaaagagatggaggagaagaggaaaggaaaagaaggagaagatgaggagaagagaagaggaggaagagcaggagatgagaaggagaagaaaaggaggagaggaagaggagaagaaaggtgagaggaaaaaagaggagtagaagaggagaaggtggaggaggagagaaggaggaagaggaggagaaggaggagaggaggagcagagaaggaggaggagagaaggaatggaggaagaataggagagaagtaggaggagggaaaagaagaaggaggggaggatgagaggagaaggaggaggaacaggagaagaggagacagagaggaggaaaagaaggaaaggaagaggagatgcaggaggaaaaagaaggaaaggaggaggagaaggtagacgaggagaggagaaagaggaagagaaaatgaggagaagtagaaggaggtgaggaggaggagagaaggagaaaaggggaggagaatggggggattaggagaggagaaaaaggagaaggagagtagaaaaaggagtaggaggagaacaggagaaggaggaggaggaaaaagagtaggagaggagaaggaggaggagtggaggaggaagaggaagaggagacaaggagaaggaggagagcaggaggaagagaggaaaaggagtggaggaggaagaggagatgaagagaggaagagaaggaggaggaaggaggaagaggagaggagaaggaagagtaggaggagaaaaggagaggaggaagaggagaaggaggaggagatgaggaggaagaaaaggaaagaaagaagaggaggagaggagaagaaggaggagttgaggaggagaggagtcagagaaggagtaggagaggaggcaaagtaaaagattggtagtaggaggaaaggtttagggggaaaaggagaggagcagaatcaggaggaaaagaggaggagatggggaggaacagagtaggagatgagaaaaaggaggaggagaagagaaggaggagaaagacaagagcaggagatgagaaggaggaacagagtaggagatgagaaaaaggaggaggggaagaggagaaggaggaggaggatgagagcaggagaggagaaggacaaggagaggagatgaaggagaaataaagtagaaggagggagaggagaaaaagagtaggaggagaagcagaggagcaggagataaaggataaaatgagaggaggaggagaaatagaggagaagcagaggagcaggagataaaggataaaatgagaggaggaggagaaatagaggagaaccagtggagaaggaggaggatgacaggaggaggaagaggcaatggagaagaggagaggaggagaagaggagaagggggaggaactgtggaggaggaggaggagaggagaaggaggatgggagaaggaggaggggagaaggaggagaagaagacaagtaggagaaggagagaaggaggaggaggaaaagaaaaggaagagggggaaaggagaaggaggaggagaggaggagtagaggaggaagaggagaggaggaggaggagagaaagatgagaggaagaaaaggagaggaggatgaagagagaaagaggagaaaatgaggagaggaggaagaggaggagacagaggagaaaaagggggaggggagaggagtaagagaggaggaggagaggacaaggatgagaggaggagcagaagaggaagaggaaaggaggagatggaaaggaggaagagaaaaggagaagaagatgaaaaaagccatcactttgtggtgtttagtaattatgactattttcatggcttttggattaaagtttaaattcaataggagagatgagcacacagatccagattatttcagagctcaatttcagagctaaaggaaaagatatgtggtaatacacctgtggacgttgccaatgcaaaacagttgcattattttggtttgggatcaagccatatgtctccatacacaatgtatgtagtgcctaggagagagaagagtgcttggcccagtgatacattgcaatctcttcttggtcagagcccaaacatcacctaagttctaggtccagcaatacatcacaatactttctgagatgaagaccaaagcaggagagccacatcacctaggtaagagccctagaggtatggcacaatgccttctgtgggtaaggctcaggaagaagaggaaagttacataacctaggagctacagccagctatatgtcacaatcaccccaaggggcagggacgatgcatgagaggagggtcacataaagtaggtgctgagcaaagcaatatgtaacaatcagaggagagtgtcatctcctacttgctggaccatgagatatgttacaacatcccctttgggcaaatcccaggtaagagaagagatttgcatcaattaattgatgggctaagagatacttcgcaatgtcccctgtagaaagagactaggagaaataaataagattccctgtgtgctgggcccagggataagtcactttttcatctgtgggcatggcccaggtaggagaggagagtcatatcatttagatgctgggcacagagatatgtaacaatctcttctataagcaaaaccgtggtaagaaaagaaagacacataaaatattttatggacccagagatatgtcacaatgctctctcttgacagagtcaaggcaagaatgtcacatcaccttggtcctgggccccgctataggtcacaatgccttctgaaggcagggtcaaggcaaataagtaacatcttggagctgggtccagtatatatgtaacagtctcccctgtgggcagaacctaggaagaagagaagtgtcacattagctaggtgttgagctcagggatatgtcaccatccctcctgtgagcagaaaccaggcaagagatgagagtacattacctgggtgaggagtgcagagagatgccacaatccccactttaggctgggcccaggcagaaaagtcacatcacctgggtgttaaaatgagcaatatttcacaatgccccttgtgggcagcaccaaggtaggagagaaaacttacgtcacctgagtgcaagtcccagcgatatgtcactatgccttttgtaagaagcaccaaggcttgagaatagagtcatctcatctaggtgctgggtccagcaatatatcatgattctatttgtgaagtgagcccaggcaggagagtcaaatcaggtatttgacaggggcatatgtcaaaatcacaccttcaaaaaaattcagggatgagattaccaatccctcacatgtcctgtttctaggtctgagagtcaacatgtcttgtatgtttggtgaagtacatgagtcaaaatctcaactgtgaactggatctgtgcagcagcttctcaatgttttttgggcattatgccccttagataagtcataaccagccatgtgtgctaaattttggtttgagggtcaccaaatccatgcataacaaatccatgtatgagagtcaacattgcaactcttgactgcctctagatataagatttaaatcctcaacagtgggccacattcatgtgagaggacaacaatctttactcttgactgtctgcttactagtgttacaatctcacctttgagctgggctctgttagtacctatctgtaccacccaaagaatttatgagatacatagtttggctctatgtcctcacccaaatctcatctacaattgtaatctccacgtgtcaggggaggaaggtaattatatcatggggcagtttcccccatgctgttttcatgatagtgagtgagttctcaggagatctgatggttttataagtgttggaagttcctccttcattcactttctctctcctgccaccttgtgaagaaggtctctgcttccccttctgccatgatagcaagtttcctgaggcctccccagccatgtggaactgtgagctaattaaacctcttttctacataaattacctggtcttgaggagttctttatagcagtgtgaaaatgaactaatacaatatgatatgcaagagagttgcaaactgcattaagacctttatgccgatatgaacacatgattgtacgtgtcactctaagctcaggtgtgagagttaacacctccccagttggctgggtctaaatagaaaaggactcatctgcctataagctgggtttagaaaggggtcactatcccatatgtggccagatgttcacatatgactgacacaattccatctatagactgtgtcttcatgtgagattcaggatctcaccagtgggttgcgtccatgggtgaggatgactatcttaaggattggcagggtgtgcataccagaaatacaatagttcctgtgtccttggacctgtgatgatactctctgtaccacttgagggctttatacaatatgcaagagagaggtaaacctctgtgacctttatacaaagaagacacccaggatcttacctttttccctaagcctagctattacagacattatctttcttattggctagttcaaggtatgagaatgatcatcacacctgtaagctgggccaagatatatgtcacaatccctcctatggattaggagtaagcaggagagtaacattacctggatttggggccagttgtatgtggcaatcttctctaagggctcagtaatatgtcacaatgatctatgtattcaagacccagtcaaaagggcctcatcaccttgttgtggggtccagtgatatgtcataatcttttctgttaggagggtccaggcagaaaagaagtcacatttcctaggtagtgtatgcagatatatgtcacaaggccccctatggggagggtctaggcaggagcctcttattttctaggtgttggaccctgcattattttgcaatacaccaaatatttggggcctgggagaaaggagtcacatcacataggtgctgggccaagttatatgttaaaaaatatggtataatacccctgtgggcagggatcatgcagaaaagttgcatctcatagttgttaagataggccacatgtcacaatacacaatttatgctgagctcaggcaggagaaaagaataacatttacctatgtgctgggctaagtgatacatcacaatacctccttggtcagagcccacaaaatagaagagagttacctcacctaggtgctgagtccatcaatatgtcacaatactcactgaggaaagggccaaagaataagaattcattatttttggcgaagggcccagagctatgtaccaatgctccttgtaggtagggcttaggaaaaaagaagagagtcacacaacctgtcacgtaacctagacagatgagaccagctctatgtcaaaattaaaacgggtgtaagagtccgggcatgagaggagaatcacatcacataaatgttgggtgaaagaatatgtcacaatctagatagtggtgccagagatatgttgcagtgacccctgtgggcaatgagcaggcagtagaatcacatcacctgtgtgtagggcctagtgataattcactctaacttctgtgggcataacacaggcaaacaaggagagtcacaacacctaggtgctggtatcagagacatgtcacaatctcttctaatggcaaagcccaagtaagtgagaagagtcacatcaagtagttcattaacttagagatatgtcacaatgctccctgtgggcagggtccagacaagagactcacatcatcttagtgctgagcccagcaaaatatcacaaagctttctgaagtaaggaccaaggcaacagtgtaacatcaccttactgttgggtccagagacatgtcacaacctctcctgcagacagaacctaaaacgaatagaagagtcacatcaactcaatgctgggcccaatgttgagtcacaatatttcccatgagcagagatcaggcagaagtgagtcatatcatgtgggtaatgggtgcagagatgtcacagtgcctcctgtaggcagggatcaggcaggagagttacatcacctgggttttggacacagtaatatatcacaatgggccatttgggcagtgtacaggcaggagaatcacataacctgggtgtggggcccagtgatatgtcacaatgccttctgtgcacagtgacaaaagagaagggtagactcacattaactgaatataaggcctagtgacagtgatatgtcaaaatgctgtctgtgggcagtgccaaggcagtggactagagtctcatcatgaaggtactgggtttagcaatatgtcaaaattccatctgtgtgatgggcacaggcagaagggtcaaagcacttagttgctggacagaggtgtacgtcacacaatctcacatgcagaacgatacagggataagattaaaattcttgcgcatgacccatttctaagtatgggagtcaacatctctatgttgggtctaagtacatgagtcacaatctcttttttttttcttttcttttttttttttttttgagatgggatgtctctctgttgcccaggctggagtgcagtggcatgatctcagctttcggcaacctccacctcccaggttcatgcgattctcctgtatcagcctcctgagtagctgggactacaggtgcacgccaccacaccaggttaatctttgtatttttagtagagagggggttttgccatattggtcatgctggtctcaaactcctgacctcaggtgatctacccgcctcagcctcccaaagtgttaggattacaggcatgagccaccacacctggccaagtcacaatcttaatggactaggtctttgcatgagaagctcactttcttctgtgcactatgcctccttagtagagtcgcagcctcacaggtgtgctgaatcttggtctgagagtcagcaacccacttgtggactggatctacttgtaagaacaactttttcaagtttcgattatctccaaatgtgacattcagaacctcaaaagttggccgtgttcatgtggcagtatgacaatctttattgtcaactggatgtgcatacaagtgttaaaatctcacctgggctgtgccttgtcaggaaactctttgtagcacctgaggtctttatgcatgagagtctcaatatgatcagaggcctccctgctggtgggagccatggttataatttttaccaaacctctttgagagtcaacttctctccaattgggtgggtccaaataaaagtttccttacctaccaatgaactaggtttagaaatgagttaccatcaactgtagcatatgacagaaacaattccagctgtggactatgtcaacctgtgagattcaggatctcacctgcaggctctgtccacgtggaagggtgaaaatcctgatggatagtaggctgagaaacacaaactcatttggatgctggggtctgtgatggcattttgttccacactagggctttatatagtgtgtgagaaagtggcaattttctataccttcatacaaagaagagacatgggatcttgcccatttctctaatcccagctaaaacagacagtaacttttctattggctggtgtgtggtatgagagtcgccattccaactgctggctggaccaagatatatgtcacagtcttacctgtaggtaggaagcaaacatgagggtcacatcacctgtgttctgggccaggaatatatcacaatattccctgacacaagggaccaggcagaagagtcacatcacctgggtattcagccaggaatatgttacaatcccctcctgaaagcagggtgcaggctgcagagtcacatcacctctttaatgggcccagctttgtgtcaaaattctttctgtgggcaaggcccaattacaagagactcatcatctgtttgcttaggccagcaatatgtcacagtctttcctgtaggcagtgtgcaggcacaagaagacagccacatcagagatatgtcaccaggtccactgtggacggccccaggcaggagccttccattttctaggtattgggcccagcgatatgtcatgatactcaaaacatgtggggaccaggcaaaaaaaaaaaaaaaaagagagagagagactcacctcaccttgatgctgggtcaagtgatgtgtcacagtcttctctggcaggtcccaggcaacaaaaatgtgtcacatctcctaggtactgaacaaagagtatcatctaatacccctgtcttcagggctcatgaagaagggtcacatcacctacttgttgggtgcagccatatattactatacacaatgaatgctgggcccatgcaggagaagagagtaacatcccctaggtgctgcgtccaggtatacatcgcaatggctccttgagcagagcccaagaagtagagaagagtcacattacttaggtgccaggtacaacaatttttcacaatacttccagaaaggcctaggcagaagtgtcacatcatcttggtgaggtgacaagaaatatggggcaatgaccctggtgggtagggctagaaaaaaagagatgcatcacataatgtagggtcagtgctcatttatctgtcacagtctcaccagtgggcagggctcaggcaagagtggagagtaatattatgtaggtactgcagcaagcagtatgtcacaatttctaccgtggacaggtccaagacagaaaacgagaatcaaatcacataggtcatgggcccagaaatatgtcacagtggcccttgtgagcaacaaccaggcaaaagaatgacattgcttgtgtgctgggcccagtgataattcattattccttctgtgggtctggcacagggaagaggagagttacaacacctagctgtttggcccagaaatatgtcactatctcttctatgtcactatctcttcaaagtccacataaaacagcagagtcacatcacataattgatgcagccacagatatgtcataatgccttctgttggcagggcccattcaagagagtcataacatctagatgttggacccagccatatgtcataacacagaatgtattccaggcttaggcaagaaatgatagtcacatcagttaggtcttggacccatggaaacattaaaattttttattgagcaaaggctaagtagcagaggagagtcacacctcctaggctttaggtccagcaatatcttgcaatgacccctaagaggatgacccaggtaaaagggtaacatcatctatgtgagaggtctagaaatatgtcccaatctctgtgtgggtaaagaacaaaatgaagagggaagttatataacctaataggtgggctgatctatgtgtcccaatcactctagtggcaagagctcaaacatggaaggagagtcacacacataggtgccgaatattttgcaatacagaatgtgtgcagagcccagaaaggagaggacagtcacatcacctaggtgttgtgcccagcaatacattgcaatctcttttagggcaaagcccaaacagtagaggtaatccttgttgctggacccaaaaatatggcataacacaccctgaaaaagggcccaggcagaagaatcacatcgcctcaggagggttccaagaatatgtcaaaaggcctactgtgggtaaggctcaggaagaagagaagagaaaagtaacctaggggctggggccagccatatgttacaacaacctcagtgagcagggcccaggcatgagaggagggtcacataatgtagatgatgtgccaagtgatatgtcataactcacactgtggacaggtctctagaaataaaggtgagtcacataatctggttgatggtcacagagatacatcacaatgtatttatctcttgtcctcatgggcaggaaccaggcagaagaatcacatctcctctgggctgtgtccagggataatttactctcccttctgtgaccagagcccaggaagaaaaggagagtcacattatctagttggtggggccagagatatgtcacaatgtcacctgttggcaaatatgaagtaagagaggagagtaacatcaaatagatgatgggtccagaaatatgtcacaattccccctgtaggcagaatctaggcaggagactcacatcacctgggttttagacctagaaatatgtcacaagatgcaatttgggcaatgccaagacagaagaataaaaaacatataccctaggtgctaggtgcagaagtatgtaacaattccatgtgaccttcctggacctaacacatagggtatatgtctttattgtgacatccttactcaggtgcttggaagaagtgtatgtcacaatcagagctgcaggtaggttcaaggataagactaaaaatcctacacatgtccctatttgggtatgagagcaaacacctcttctatgttgggtctgagtacaaaattcacaatatcaacagtggactgaatttgttcatgagaacttcaatcccttctgtggaccgtatcttattcatggagtaatagcctcataggtgagttgaatcttagtctgaaatacaccaacccacctgtgaattacatcgtagtatgagtcaattatccaacttataacttcctcctaatgtgagattcagaacctcagcagtaaactgaattcacaaatgcaagaatgaaaatctttactaagagctttgtgtgcataagagtgtcacaatctcacctgggctagagatatattacaatcccctcctgaaagcaggtcacggacagcaaagtcacctcaccttgatgctgagccagcagtaaattacaatgttctctgttagcaaggaacatgaaggagagacacatcacctgggcttttgggcccagtaatatctcacaatctcccctgagggaagaacatacaaagaagaagagtcacgtcagccaggtgttgcgttagtcataggtaacaataccccctgtgagcaggaaccaggcagggaagtgagtcccaaaaatgtcccctttaggcagtgccaaggcaggataatagagtcacataacctaggtgctggatccaacaataagtcacaatcctgtacgtgggctgggcccagactataggtcaaatcactcaggtgctggccagaggcatatatcacatttacacctgcaggaaggtcataaaatgatatttacaatccagcacatgtcctgtttctaagtatgtgagttaacacctcatgtatcttagatgtaagtacctgagttaatctcaacaataaactgtatctgtgcatgagaggcacaatccttcctgtgtgctgttttatctgagtgaagttacagcctcacaggtgagctgaatattggtcttagagtcaccaaccttgtggaccagattcacatataaaagtcaattttccaatgtttgacagctttgggttgtgaaatccagagccttaacaatgggctgtgttcatgtgggaagatgacaatcttttctgtcgacttggtgagtgtcacaatctcacctatgtatcgccctagggctttatacctgatgcatgagattctcaatcttctctgagacatttatgctggtatggatcatgattgtacctgtggccttaagtccaagcatgagaatcaacatctctccaattagccgagtccagaatgaagaatcttcaccttcctatgagctgagattaaaatgagtcatcatcccaactgtgcttacatgtttacatatgatagtcacaatctcaactgtggactgtgtctgcatgtaagattcaggacctcaataatgggctttgtttaagtgagaaaatgatgagaaatacaacctctcctatgtcttgagccctgtgttgacactctctgtaccacccaaggactttctatgaaatgtgagacagtggtatttctctatgactttcatagaaaaatgagacctaggatttgacacgttttcctaagacagacagtattctcatattggctgactcaagttatgagagtaattatgacacctgtaaactgaattaagatatatgtgacaaccccacaactgggtaaggagggagtgagcaggagaatcacaccatctgggtgctgtgtcagagatatttacaaccttctctgagggcagtgaccaggaaagagagtcacaccatgttgttgctgggctagggttatgtcataatttttcatgagagtaggcaacaggcaacagagtcacagcacctgtgtttttagttatgatatgttataatcccatcctgaaagcaggactaaggcatcagagtcccttcaccttgttgccgggcctaacgatatgtcataatgtctctgtggctaggctgagtcagcaaaggcacattacctagtgctggctccagtaatgtgtcacagtgcttttggcatggcccaggcagaagaggaaatttgaaatacctaggtgatgaagaaaaagacacatcttaataaccttgtgggtaggacctatgcaggagagtcatatcacctaggtgttggacccagccatattttacaatgcacaatatacgtgggggccaggcaggagaggagagtttcatcacatgctcactgggctcagtaatatatccccatcttccctgtgcacaaggtgccagcagaagaggagagtcacatttcctaagtgatagatgtagagatatgtcacaggtctcctatgggcaggacccaggcaggaaccttttattttctagatgtttagtgcaaaaatatgtcataaagccttaaatatccaggggccaggcaaaagaggagtgtcatgttacctagaatctgtgtccagtagtatgtcacaacccctcattttttgtaagacccaggcagaagaggagagacacatcacataggtaatagacataaaaaatatattaaaatgcctttgtgagcagggcttatgtgagatagtagttatcacctaggcgtgacaacatgcaatatgtcacaacacacaatgtatgcagggcccaggcaggagaggagagtcacatcaccaaggtgcagggcacatcaacacataaaaattccttattggacagagtccaagatgttgagaaagttgcatcacctaaatgcttggtccaacaatatatcacaataccctctgagtgaaggccccaggcaggagagtgagtcacatcacctagctaagagacccagagatatgtaacgatgctttttctgacaaaggtccaggcaaaagaaacacattatctggtttctggatcaaatgatatgtcacaattctttctgttgtcagggtgcaggcagagatgaggagtcacattttctaggtgatatgtcacaatgcctactgtggggagggtccaagcaagaaactcaaatcaccttggtaatagtccaagcaatttttaatagtgcctttagaaggcaggactaaggctaaaagtgacatcacctttgtgttgagtccagcaatgtgtcacaatgcttcctacaaacatcaccaaggcagaacaggagactcatatcacctgggggcaaggcctacctgtatgtcacaatgcccctgtggattttggtaatgaaaaagaggagagtcacatcacctagctgaactcattgtcttttttccagcttaaactttctaaaagcttagcagtgttctctccaaaacacagagctgctcacattacagcccagctccaaaacgtttgatggctcataacagcctacacagctgagccaacatccattttcctaaggcgaactcctgttatcatatcaacgctacaccaccccgctaaactatattctcttgtcacactctacttcttgtcctaccctgtgctcaaataagcctcatattttaatacttcaagtcctgtacttaaactgcttttttgcccaaatttacatttcttctttcccacgttcttcttctacacatggaaaacctgcacatttgagggtatcaccttttctttccactgcaacttctcacttgccagttctccacgtgttcttgctggttgtgaggcactggtgaattttagaaccagaaccatattacatctatctttgtagttctagagcctggtaccaggtgtaggtgtcaaaaaatggttcccaatgcaagcttgctgaaagtgatattgaagagatgagaaaagaaaggagccagaatgctggtctactaatccagattgctttccaatattgttttgttgaaactctcccaatgtcatgagaaaaataacaatgataataataatactagtagtaaatacagaagataagtcagttaaaattgagctggtagcatgcatgacttcaattctctgtttattcctagttttgaaatagtccttatccacagataggaaaaaactggaaacagaacctcaagtgcctatcacaaggcaagatttgccaatttcataacttgctcaggcaccctcataaaagaatctaggcatgctgatgaccccatctcaaacattcaaaaaagacagaaggtttttctctcactgtcctccagtacatgtagctcctcctgcttaaaaagcaaaacaacaaagaaataatacctcccagaggctatcacagttgatcttggacaaatctttagattaaattagtagtcaagtcaattcaattgttgcccttacttggctcctatcatatgttatgaacttcttaggatcaacccaatgcaaattctgaggcaaaaccttgagtttctatattatgtaagtgacaataacctattataacaaaccaatagacctgttttcacagtgttgggcctacccaaagcaaaactaaatttcccaaacacttatgagtttacagtttcaaatctcttcaaaagtaggtttcatatgagtctttgaacagggctcagcactttcagtgaggttaaaagtgggtgtccacacaaaaggtttcaagagataagaaagtctcccactacccaccacacagaagaccagcagaatcacagagtccatgcccattctttttcacctgtgggaatatttcccaccatgtgaaagaccaccactttttcacatactattctttccaatgagaacatggtaaaaatttgatacttggcaggttttgttcagggtttcactctactttttcactgggtctcagtctgccagcattctgctttagtgtcttgttgaaccccccctctttaagggcacacaaatccaaatcagtcagttcatgcactaacatgacctctgcaagcccctcagtccacagaacaggaatctccattcctgaccatcacaggagggaagttctaacttacattgtcaaatattagctaaaattagctgttgaataggtaagctgtgatttatttctggaaaccagaaccctgtcctggcacatttatactttttccttggtgtgcccatcttttcccttgatatgcctaacaggaagaactctgcacacaggaggttttcagttagtatttttttggtgaacgaatcatgtctctatggtaggtagtctgtcaggggtcagaagcacagccctgaagacaaacttaacagtttgcattgtaatagctggcccactatctgggtccctattttctcatgtaaatcctgaggataataattacttctacacccctctgtcatagaattataatgaatgaaaaaagtgatgcttaaaaaaaattaggatgctggcagctattgctcaataattgttagaccttatgacttctgctcttactgctatcatgctgagtgtgtttctatgtaaaaaactaacaacgaacaaagtgggaaaattaagttacagcttttgattattgacttaccagattggattcctatcgattaataggtctagcacaggtagaagagggacagagtaggtcataggtcacaattcccactgtgagcaggaaccaggcaggagaagtgagtctcaacaatgtcccttctgggcagcaccaaggcaggataataaagccatgtcacctaggtgctgggtccaacaataagtcacaatcctgtatgtgggctgggcccaggctagaaagttcaatcactcaggtgctggccagaggcatatatcacatttacacttgtaggaaggtcatataatgatgtttacaatccagtgcatgtcctgtttctgagtacgtgagttaatgccttatgtaagttgggtcttagtacatgagttcatctcaactataaactggatctgtgcataagaggcacaatccttcctgtgtgctgttttatctgagtcagttacaacctcacagatgtgctgaatattggtcttagagtcattaacctacctgtggatcagattcacatatgagactcaattttccaacgtttgactgcttttggtggtgaaatccagagccttaacaatgggctgtgttgctgtgggaagatgactattggaggaaccagcccccactattttaacgtaggtttttctattttccctaagcgtcagcctgtctgagaaataaagagaaagagtacaaagagataaattttacagcttggcctccaggggtaacatcacatataggtaggttcatgatgttccctgagatgcaaaaccagcaagtttttactagggattttaaaaggggagggggtgcatgaacagggattaggtcacaaagatcacatgcttcaaagggcaacaaagatcacaaggcaaaggcaaaattagaattactgatgagggtctatgtcccgctgtgtacatattgtcttgataaacatcttaacaggaaacagggtttgagagcagagagcctgtctgaccaaaatttaccagctggaatttctcaatcctactaagcctgagggtactgcaggagaccggggcatatttcagtccttatctcaaccgcataagacagacacccccagagtggccacttatagacctccccccaggaatgcaattcttttcctagggccttaatattcaatattccttgctaggagaagaatttactgatatttcttctactctcacgtccatttataggctctttgcaagaagaaaaatatggctctattctgcccaaccctgcaggcacttagaccttatggttatcttctcttgttccctgaaaatcactgttattctgttcttttttaaggtgctctgatttcatattgttcaaacacatatgttttacaatcaatttggacaatagtgatcctgaggtgacataaattcccagcttacaaagataacaggataaagagattaaagtaaagacagacataagaaattatgagagtattattagagaagtgataaatgtccatgaaatcttcacaatttatgttcagagattgcagtaaagacagacataagaaataataaaactatgaattttaggaactgataaaagtctatgaaatattcacaatttatgttcttctgccgtggctccagccagtccctctgtttggggtccctgacttcctgcaacagatgacaattttttctgttgactgagtgagtgtcaaaatctcacttatgtatcaccctagggctttataccttatgcatgagattctcaatctgctctgagacatttgtgctgatgtgaatcatgatcattcctgtgctctttagcccaagtatgaggttcaatgtctctccaattagctgagtccagaatgaagaatcttcaccttcctatgagttgaccttaaaatgagtcaccatcccaactgtgtttacatgtttacatatgatagccacaatctcaaatgtagactacatcaaccagtaagattcaggacctcaataatgggcttcattcaattgagaaaataacaagaaacacaacctcacctgtgccttgggctctgtgttgacactccctgtaacatccaatggctttctattaaatgtgagacagaggtaattctctatgaccttcatacaaaaatgaggcctaggattttttctttatactttaagttttagggtacatgtgcacaatgtgcaggttagttacatatgtatgcatgagccatgttggtgtgctgcacccagtaactcctcatttaacattaggtatatatccaaatgctatccctcccccctacccccaccccacaacaggccccggagtgtgatgttccccttgttgtgtccatgtgttctcattgttcaactcccaactatgagtgaaaaaatgcggtgtttggttttttgtccttgagatagtttgctgagaatgatggtttccagcttcacccatgtctctacaaaggacatgaactcatcattttttatggctgcctagtattccatggtgtatatgggccacattttcttaatctagtctatcattgttggatatttgagttggttccaagtctttgctattgtgactagtgctgcaataaatatgcgtgtgcatgtgtctttatagcagcatgatttataatcctttgggtttatatctagtaatgggatggctgggtcaaatggtatttctagttctagatcactgaggaatcgccaaactgacttccatgatggttcaactagtttacattcccaccaatggtgtaaaagtgttcctatttctccacatcctctccagtacttgttgtttcctgactttttaatgattgctattctaactggtgtgaaatggtatctcattgtggttttgattgcgtttctctgatggccagtgatgatgagcattttatcatgtgtcttttggctgcataaatatcttcttttgagaagtgtctgttcatatccttcatccaatttttgatggggttgtttgttttttcttgtaaactggtttgagttcattgtagattctggatgttagccctttgtcagttgagtagattgcaaaaattttctcccattctgtaggttgcctgttcactctgatggtagtttctttagctgtgcagaagctctttagtttaattagatcccatttgtcaattttggcttttgttgccattgcttttggtgttttagacatgaagtccttgcccatgcctatgtcctgaatggtattgcttaggttttcttctagggcttttatggttttaggtttaacgtttaagtctgtaatccatcttgaattaatttttgtataaggtataaggaagggatccagtttcagctttctacatatggctagccagttttcccagcaccatttattaaatagggaatcctttccccatttcttgtttttgtcaggtttgtcaaagatcagacagtcgtagatatgtggcgttatttctgagggctctgttctgttccatttgtctatatctctgttttggtaccagtaccatgctgtttggttactgtagccttgtagtatagtttgaagtcaggtagcgtgatgcctccagctttgttcttttggcttaggattgacttggcaatgcaggctcttttttggttccatatgaactttaaagtagttttttcgaattctgtgaagaaagtcagtggtagcttgatggggatggcattgaatctataaattaccttgggcagtatggccattttcacgatattgattcttcctacccatgagcacagaatgttcttccatttgtttgtatcctcttttatttcattgagcagtggtttgttgttctccttgaagaggtctttcatgtcccaagtaggttggattcctaggtattttattctttttgaagcaattgtgaatgggagttcactcatgatttggctctctgtttgtctgttattgatgtataagaatgcttgtgattcttgtacattgattttgtatcctgagacttcactgaagttgcctatcagcttaaggaggttttgggctgagacaattggattttctagatttacaatcatgtcatctgcaaacagggacaatttgacttcctcttttcctaattgaataccctttatttccttctcctgcctgattgccctggccagaacttccaacactatgttgaacaggagtggtgagagaaggcatccctgtcttgtgccagttttcaaagggaatgcttccagtttttgcccattcagtatgatattggctttgggtttgccatagatagctctcattattttgagatacgtcccatcaatacctaatttatggagagttttttgttgaattttgtcaaaggccttttctgcatctactgagataatcatatggtttttgtcattggttctgtttatatgctggattatgtttattgatttgcatatgttgaaccagccttgcattccagggatgaagcccaactgatcatgttggataagcttttccatgtgctgctggatttggtttgccagtattttatgaggatttttgcatcgatgttcatcagggatatttgtctaaaattctcttttttatgtatgtctctgccaggctttggtatcaggatgaagctggcctcataaaatgagttagggaggattccctctttttctattgattggaatagtttcaggaggaatgataccagctcctccttgtacctctggtagaattcggctgtgaatccatctggtcctggactttttttggttagtaagctattaattattgcctcattttcagagcctgttactggtcttttaagagattcaacttcttcctggtttagtcttgggagggtgtatgtgtcgaggaatttatccatttcttttagattttttagtttatttgcatagaggtgtttatagtattttctgatgtagttagtatttctgtgggattggtggtgatatcccctttatcattttttattgcgtctatttgattcttccctcttttcttgtttattagtcttgctagtggtctatcaattttgttgatcttttcaaaaaaccagctccaggattcattgattttttgaagggatttttgtgtctttaggtccttcagttctgctctgatcttagttatttcttgccttctgctagcttttgaatgtgtttgctcttgcttctctagttgttttaattgtgatgttagggtgtgaattttagatctttcctgctttctcttgtgggcatttagtgctataaattttcctctgcacactgccttgaaaaaactactttaaagttgatatggaacaataaaagagcccgtgttgccaagtcaatcctaagccaaaagaacaaagctggagggatcacgctacctgacttcaaactatattacatgtctacagtaaccaaaacagcatggtactggtaccaaaacagagatatagaccaatggaacagaacagagccctcagaaataatgccgcatatctacaagtgtctgatttttgaccaacctgacaaaaacaagaaatggggaaaggattccctatttaataaatggtgctgggaaaacaggctagccatatgtagaaagctgaaattggatcgcttcctaacaccttatacaaaaattaattcaagatggattaaagacttaaatgttagacctaaaaccataaaaaccctagaagaaaacctagacaataccattcagtacataggcatgggcaaggacttcaggtctaaaacaccaaaagcaatggcaacaaaagccaaaattgacaaatgggatctaattaaactaaagagcttctgcacagctaaagaaactaccatcagagtgaacaggcaacctacagaatgggggaaaatttttgctatctactcaactgacaaagggctaacatccagaatctacaatgaactcaaaccagtttacaagaaaaaataaacaactccatcaaaaattgggtgaaggacatgaacagacacttctcaaaagaagatatttatgcagccaaaagacacatgataaaatgctcatcatcactggccatcagagaaatgcaaatcaaaccacaatgagataccatctcacatcagttagaatagtgaccattaaaaagccaggaaacaacaggtgctggagaggatgtggagaaataggaacacttttacactgttggtgggactgtaaactagttcaaccatcatggaagtcagtttggcgattcctcagtgatctagaactagaaataccatttgacccagccatcccattactgggtatatacccaaaggattataaatcttgctgctatgaagacacatgcacacgcatgtttattgcagcactagtcacaatagcaaagacttggaaccaacccaaatatccaacaatgatagactagattaagaaaatgtggcccatatacaccatggaatactatgcagccataaaaaatgatgagttcatgtcctttgtagagacatgggtgaagctggaaatcatcattctcagcaaactatcacaaggacaaaaaaccaaacaccacattttttcactcatagttgggagttgaacaatgagaacacatggacacaggaagcagaacgtcacaccctggggactgttttgggtcaggggagggtggagggatagaattaggagatatacctaatgctaaatgatgagtgaatgggtgcagcacaccaaaatggcacatgtatacttatgccacaaacctgcacattgtgcacacgttccctaaaacttaaagtattataataataaaaataaaaaaaagaaaagaaaggtttaactctgtaagatgaattcacacatcactaggaagtttcacaaagagcttctttctagtttttatctggggatattcagtttttcattgtaggcttccattgccccaaatgtttcttcactgcttctaccaaaagagaacttccaaactgctacatgtttaactctgtgagatgaatccattgaaccaaagcactttcacagatagcttctttctagttttcatctgggaatattttgtttcttgccatatgacttaatgggcttccaaatatgtaggtggaccccctgaaactgttgctatggaataaaagaagaaatgctcctgattattgtaaatacaaaattgcatgcaggattgtgtaaagacaatgccatgttgggctgccaaaacgagccaacagcctgtgatgttcttccacctgcagggagcctataaacagatatgcagtcagggagacttcaaaaaatcagtattcctgtcccagagaagcagatgttcataacttttggaatgcacatatcacaaattggtgtctcagaatgcttctttttagtttttttctgaagatatgtcctttttcaccataggccacaatgcattctgaaatatcccttcacagattctataaaaagagtgttgtaaaactgctcagtcaaaagaaaggtttaactctttgagatgaatgcacatatcacaaagcagtttccccaagagcttcttactagttttcattagaagatattttctttttcaccgtaggcctcaaaatgctcccaaatataccttcacagattttagaaaaccacaatttccaagctcctcaatcaaaagaaatgaataactctgtgaaataaaaggaaacatcacaaagctctttcttaggaacctttctagtttttatgtggagatatttcctttttcaccgtagtcctcattgagatctcaaatatccctttgcaaattaaacaaaaatagtattttgaaactgctcaatcaaaagaaaggtgtaactctgtgagaagaatgtactcatcacaaagcagttcctcagaaagcatctttctggtttttatctgaggatatttcctttttcaccatcagcctcattacattccctagtatcctttcacagattctaccaaaacagtttccaaactgctaaatcaaaagaaagcgttatttctgtgagatgaatgcacacatcacaaagtagtttctcagaaaatgtctttctagtttttatgtgaatatattttctttttcactgtaggtctcaatgcgctcccaaatatcccatcccagattctgaaaaaacagtgtttccaaacagctcaatcaaaagaaagctttaactctgtgagatgaatgcacaaaccacaaagctgtttctcagatatctttctaggtctatctgaagacatttaattattcaccataggcctgaatatattcttaaatatctctccacagattctacaaaaacactgtttccaaacttctgaatcaaaagaaagttttaactgtgtgagatgaatgtgcacatcacaaagcaccttctcagaaacttctttttagttttttgtgaagatatttcctttttcaccataggcctcgatgtgctcccaaatatccctttgcagattcaacaaaaacagtgtttccaagatgctcaatcaaaaaaataatttatctttgtgggatgaatgcacacatcacaaagcagtttctccaaaagcttctttctggttttcattcgaagatatttcatttttcaccataggcctcaatgcactccaaaacatccctttagggattatataaaatcggtgtttccaaactggtcaatcaaaagaaactttaactctgtgagatgaatgcacacaactcaaagaagcttctgagaaagcttctttctcgtttttatttgaagatatttcatttttcaccacaggcctcaatgtgttcccatataacccttgacagattctataaaaacagtgtttccaaacttctcaatcaaaagaaaggtttaactctgtgagatgaatgcatgcatcatgaagcagtttctcagaaagcttctttctagtttttatgttaatatacctcctttttcaccataggcctccatgtgctcccaaatatccctttgcagatacaacaaaaattgtgtttccaaactgctcaatcaaaagaaagctttaagtctgtgagatgaatgcacttatcacaaagctgttaatcagaaagcttctttctagtttttttgtgaagatatcctttttcaccataggcctcaattcgctctgaagaatcccttagcagatttgcaaaaacagtttttccgaactgctcaactgaaagaaagactcaactctgtgagatgaatacacacatggcaaatcagtttctcagaaagcttctttctactttttatctgaagatatttctttttcaccatagtccccatagcactcttaaatatctttttgcagattccacaaaaaatgtttttctctaaaatgttcaaccaaaagaaagcttaaactctatgagacaaatgcagacatcacaaaacagtttctcataaagcttctttctagtttttatctgaaggcatttcctctttcaccataggcctcaaaactgtcctaaatattccttcccattttctacaaaaacagtgtttccaaactgctcaagcaaaagaaagctttagctctgtgagaggaatgcacacatcacaaagaagtttctcagaaagcttctttctagtttttaccagaggatatttcctttttcaccataggcctcaatttgctcccagatatctattcacagattctacaaaaacggtatttcccagctgctcaatctaaagaaaggattaactccgtgatatgaatgcacgtataagaagcagtttctcagaaagcttctttctagtttttatctgaagattgttcttttacaacataggcctcattgagctccaaactgtaccctgacagactctacagaaacagtgtttccaaactgctaaatcaaaagaaagttttaactctgtgagaaaaatgaatacatcaaaaagcagattctcagaaagctgccttcaagtttttatctgaggatatttcctttttaaccataggcttcaattcactcccaaatatcccttagcagattctgcaaaaaaagtgtttccaaactcctcaatcaaaagaaagatttacctctatgagaggaatgcacacatcacaaagcagtgtctccaaatgcttctttctggtttttatctgaagatatttcctttttcgccatagcccaaagtgcttctaaatatcctttcgcaggttgtacaaaaacagtgtttccaaactgctccatcaaaagaaagcttaaactctgagacgaatgcagacatcacaaaccaggttctcagaaagcttctttctagtttttatgtgaagttatttcctttttcactctaggcatcaatgctctcccatatatcccttgacagagtctacaaaaaaagtgtttccaagctgctcaatcaaaagaaatttttaactctgtgagaggaatgaacacatcataaagcagtttctcagaaagttgctttcaagtttttatcagaggatatttcctttttcaccacagcaccaatatgctcccaaatatcccttcacagattctacaaaaacagttttccaagctgctctattgaaagaaaggtttaactctgtgagatgaatgcgcacatcacaaagcagtttctgggaaagcttcataataggtttcatctgaagatatttactttttcaccatgggcctcaactcccaaatatcacttcacagattgtacaaaaacagtgtttccaaactgctcaatcaaaagaaaggtttaactctgtgagatgaatgcccacatcacaaagcagtttctcagaatgcttctttttagttttcatctgaagatatttcctttttcacataggcctcaatgtgttcctaaatatcccttcacagattccacaaaatcagtgtttccaaactgatcaatcaaaagaaatggttaactctgtgtgatgaatgcacacatcacaaatcagtgtctcaaaaagcctttctgtggtttttatctgaagatatatccttttccaccataagcctcaaagtgttcccaaatatcctttagcagattctaacaaaacagtgtttccaaatgctaattcaaaagagaaatgcaaatcaaaatcacaatgagataccatctcacaccagttagaatggcaatcattaaaaagtcaggaaacaacaggtgctggagaggatgtggagaaataggaacacttttacactgttggtgggactgtaaactagttcaaccattgtagaagtcagtgtggcgattcctcagggatctagaaagagaaatacgatttgacccagccaccccattactggatatatacccaaagcattataaatcatgctgctataaagacacatgcacacgtatgtttattgcggcactattcacaatagcaaagacttggaaccaacccaaatgtccaactatggtagactggattaagaaaatgtggcatatgtacgccatggaatactatgcagccgtcaaaaatgatgagttcatgtcctttgtagggacatggatgaagctgaaagccatcattctcagcaaactatcgcaaggacaaaaaaccaaacaccgcatgttctcactcataggtgggaattcaacaatgagaacacatagacaaaggaatgggaacatcacatactggggcctgttgtggggtgggggaggggggagggatagcattaggagatatacctaatgctatatgatgagttaatgggtgcagcacagcaacatggcacatgtatacatatgtaacaaacctgcatgttgtgcacatgtaccctaaaacttaaaatataataacaaaatttaaaaaaaagagaatgttttaaatctgtgagatgaatgcacacataacaaagaagtttctcagaaagcttctttctatttttcatctagagatatttcctttttcaccataggcctcaaagtgctcccaaatatccctttacagattctacaaactcagtgtttccgaactgcttaatcaaacgaatgcttaaactctgtgggatgaatgcagacatcacaaagcagtttctcagacagcttcattatatttcttatttgaagatatttcctatttcaccatatgcttcaaagtactcccatatgtccctttacagattctacaaaaacagtgtttccaagatgctcaattaatagaaaggtttaatttggtgagatgaatggacacatcacaaagctgttaatccaaaacttctttctcgtttttatctgaagatattttttttttcaacataggcctcaatatgctcccatatattccgtgacagattatataaaaacagtgtttccaaactgctcaatcaaaagaatatttaactctgtgagatgaatgcacacatcacaaagccgtttctcagaaaacttctttctagtttttaaatgaagatactccctttttcaccataagcctcaatgggctcccaaataatcctttgcggattcaacaaaaacagtgtttccaagatgctcaataaaagaaagatttatctctgtgagatgaatgcgcatatcacacagcagttaatcagaaggcttctttctagtttttatgtgaagattatttcctttttcaccagaggcctcattgcattcccaaatatcccttcacagattccacaaaaatagtgtttccaaactgttcaataaaaagaaaggtgtcactctgtgagatgaatgcctacatcacaaagcagttcctcagaaagcatatttctggtttttatatgaggatatttcctttctcaccataggccacaatgagctcccaaatatcctttcacagattcttcaaaaacagtgtttcaaacggcttaatcaaaagaatgcttacacactgtgagacaaatgcagacataaaaaagcagtttctcagaaagtgtctttctagtttttatttgaagatatttcctttttaaccataggcctcaatgcactcccaaatatcccttggcatattctacaaaaacagattttccaaactgctcaatcaaaggaaagttttaactctgtgagatgaatgcactcattacaaagcagataatcagaaagcttccttctagttttaatgcgaagatatttcctttttcactataggcctcattgtgtttcaaaaaatcctgtcacagattctacaaatacagcgttaccaaactgctcaatcaaaagaaaggtgtcactctatgagatgaatgcacacatcacaaagcagttcctcaaaaagcatctttctggtttttatctgaggatatttcctttttcaccatcagcctcattacattccctagtatcctttcacagattctacaaaaacagtgtttcaaaactgcttaatcaaaagaatccttacactctgtgagacaaatacaggcataacaaagtagtttctcagaaagcgtctttctagtttttatgtgaagatattccatttttcaccataggcctcaatgcactcccaaatatccctttgaatattctacaaaaagagattttccaaactgctcaatcaaagtaaagttttaactctttgagatgaatgcgcacatcacaaggcagataatcagaaagcttctttctagtttttatgcgaatatatttcctttttgactgtagacctcattgcattccgaaaaatccctacacagattctacaaaaacagtgtttccaaactgctcaatcaaaagaagggtgctgctctgtgagatgaatgtacacgtcacaaagcagtgccttagaaggcatctttctggtttttatctgaggatatttcttttagcatcataggccccagtatgctcccaattatcctttcacagtttctacaaaaacagtgtttccaaactgcttcatcaaaagaatgtttacactctgtgagacgaatgcagacatcacaaagcagtttctcagaaagcttctttctagtttttatgtgaagatatttcctttctcaccatagacatcaaagtgctcccacatatcccttcacagattgtacaaaaaaagtgtttccaagatgctcaatcaacagaaaggattaattccgtgagatgaatggactcatcatctcacatctcacatctcacatctcacatctgattaacaaagctgttaatcagaaagcttctttctggtttttatctgagaatatttcctttttaaccataggtctcaaagggcttaaaaatatcccttcttagattttacaaacacactgtttccaaacttctcaatcaaaagaatagtttcactctgtgagatgaatgcacacatctcaaagctgtttctccaaaagattctttctggtttttatctgaagttatttccttattcaccataggcctcaatgtgctcccaaacatcctttcccagatcctacaaaaacagtgtttccaaactgctcaatcaaaggaaaggtttagctctgtgagatgaaagcacacatcgcaaactcattctgagatatctttctggtttttatctgaggatatttcctttttcactataggcctcagtaggttcccaaatatctcttcccagattctacaaaaacagtgtttccaaactgctcaatcaaaagaaatgtttaactctgtgagatgaatgcattaatctcaaagcagtttctcacaaagcttctttctagatttatctgaatatatttcctttttctctgtaggcgtcaaagcactcccaaatatcactttgctgaatctacaaaaacagtctttccaaactgcttcatgaaaaaaaaggattaactccgtgagatgcatgcacacatcacaaagcagtgtcacaaaaagcttatttctagtttttatgtgaagatatttccttttccaccattggcctcaaggcactcccaaatatcccttcgcagattgtacaaaaacagtctttccaagctgctatataaaaagaaaggtttaattctgtgagatgaatgtacacatcacaaagctgtttctcagagcacatctttctaatatttatgtgaagatatgtcctttttcaccattggcctcaatgtgctcccttatatcccttgacagattctataaaaacagtgtttccaaactgcctaatcaaaagaaaggtttaactctgtgagatgaataaatacatcacagagcactttctcacaaaacttctttccagtatttatgtaaagatatttcctttttcaccgtaggcctcaatgcactccaaaatatcccttcacagattctagaaatacacagtttccaaactgcttaatcaaaacaaaagattaactctgtgagatgaaagcacacatcacaaaactgtttctcagaaatctttctggtttttatctgatgatatttcctttttcaccatagacctcaatgctttcctgattgtccctttgcagatccaacaaaaacagtgtttccaaactgctcaatcagaagaaagttttaactcagagagacgaatgcacacatcacaaagcagtttctgggaaagcttctttctagtttttatgtgaagatattttctttttcaccatagggctcaaagagctcccatatatccattgacagattatattaaaacagtgtttccaaactgctcaatcaaaagaaatatttaactctctgagatgaatgcacacaacacaaatcagtttctctgaaatattctttctagtttttatgtgaagatgtttccacttccaccataggcctgaatgtgctccaaaatatccttcacagattctagaaacacaatgtttccaagatgcaccatcaaaggaaaggtttaactctgtgagatgaatggactcatcaaaagcagttagtcagaaagcttctttcaattttttatctgaggatattttctttttcaccataggcctcattgcattccgaagtatcctttcacagattccacaaaaacagtgtttccaagcttcccaataaaaaggaagctttatctctgtgagacaaatgcacacatcacaaagcagtttctcagaaagtgtctttctggtttttatgtgaagatatttccttttttcactctcagcctcaaagcgctcccaaatatcccttcacagattctacagaaacagtttatccaaactactcgatcaaaagaaaagtttaactctgtgatttgaatgcacaaattacaaagcagtgtctcagaaagcttctttctagattttatctgaggataattcctttttcaccataggcctcaatgtgctctcataaattccttggcagattctacaaaagcagtgtttccaaagagcaccatcaacagaaaatgtaactctgagatattaatttacacatcacaaagaattttctcagaaagcttctttctacttttcattggaagatattgtctttttcaccttggtcctcattgtgtttccaaatatccatttgcagattctagaaaaacacagtttccaaactgctcaatcaaaagaaaggattaactgtgtgagatgaaggcacacagaaacaaagctgtttctcagaaatctttctagtttttatgtgaagatatttcctttttcaccataggcctcattgcattcccaaatatcccttcacagattctacaaaaatagtgtttccaaactgctcaatcacaagaaatgtgtatctctgtgagatgaatgcacacatcacaaccagtttatcagaaagattctttctagtttttatctgagaatatttcctttttcaccattggcctcaaagggctcccaaatatcccttatcaaattctacaaaaacagtgtttccaaactgctcaatcaaaagaatattttaactctgtgagatgaatccacacatcacaaaccagtttctccaaaagaatctttctgttttttatctgaatgtatttccttttcaaccataggcctcaatgtgctcaaaaatgtcctttcccagatcctacaaaaacagtgtttcaaaactgctcaatcaaaggaatggtttaactttgtgagatgaatgcacacatcacaaagctgtttctcagaaatctttctggttatatctaagaacatttcctttttcactataggcctcaatccattcccaaatatcccttcgcagattctacacagtgtttccatactgctcaatcagcacataggttttactatgtgagatcaatgcatccgtcacaaagcagtttctcagaaagcttctttctagatttatctgaagatgtttcctttttctaagtaggcctcaaagcactcccaaatatccttcacagattctacaaaaacagtctttccaaactgctcaatcaaaaggaaggattaactctgcaagatgaatgcacacatcagaaagcagtttctcagaaagcttctttctaatttttatgtgaaaatacctcctttttcaacataggccttgaggaactcccaaatatccctttgcagattgcacaaaaaacagtgtttccaaaatgctaaataaaaagaaaggtttaactctgtgagatgaaagtacacgtcacaaatctgtttctcagaacacttctttgtagtatttatctgaagatatttcctttttcaccataggcctcaatgtgctcccaaatatccctttgcatattctagaaaaacagagtttccaaactacttaatcaaaggaaaagattaactctgtgacgtgaaagcacacaccatgaagctgtttcttagaaatctttctagtttttattgacgatatttcctttttcaccataggcctcaatgtgttcccaaatatccctttgcaggttctacaaaaacagtgcttccaaactgctcaatcagaagaaaggtttaactctgagagatgaatgcacacatcacaaagcagtttctcagaaagcttctttctagtttttatgtgaagatatttcctttttcaatgtagggctcaatgcttcccatatatccatggacagattatattaaaagagtgtttccaaacttctcaatcaaagaaatctttaactctgtgaaatgaatgtacacatcacaaagcagtttctcagaaatcttctttctactttttatgtgaagatgcttcttttttcaccataggtctcaatgtgctcccagaaatccttggcagatagtacaaaagcagtgtttccaagatgctcaatcaatggaaagattaaactccatgagatgaatggacacatcacaaagcagtcgatcagaaagctacttctaatttttatctgaggatatttcctttttcaccttaggcctcattgcattctgaagtatcctttcacagattctacaaaaacagtgttccaaggtgcccagtaaaaaggaagctttatgtctgtgagacaaatgcatacatcacaaagcagtttctcagaaagtatctttctggtttttatgtgaagatatttcctttttcaccataggtctaaatatgcttccaaatatcccttcatagattctaccaaaacagtattttcaaactgctcaatcaaaagaaaggtttagctctgtgagatggatgcacacatcagaaagcagtgtttcagaaagcttctttctagattttatgtgaagatatttctttttcagcataggcctcaatgtggtatcataaatcccttcacagactttataaaaacagtgtttccgaagcactcaataaaaagaaaatttaactctgtgagatgaatgcacacatcacaaagcagtttctcagaaaggttctttctagttttcatcagaagatattttctttttcaccataagcctcattgtgctcccaaatatcccttttcagattctagaaaaatacagtttccaaactcctcaatcagaagaaaagattaaccctgtgagatgaatgcacacatcacaaagcagtttctcagcaatctttctagtttttatgtgaagatatttcctttttcaccataggcctcattccattccaaatatcccttcacagattctacaaaaatggtgtttacaaactgctcaatcagaagaaaaagttcaattctgttagatgaatgtacccatcactaagcagtttctcatgaagcttctttctatatttatctgaagatattcctttttcacagtaggcctctatgctcccaaatatcccttcatggatcctgcataaacagtctttccaaactgctcagtgaaaagaaagtatttactcagtgggatgaatgcacacatcacacatcagtatctcaaaaagcttttttctggtttttatctgaagatatttctttttccaccataggcgtcaaggcactcccaaatatccctgtggagattctaacaaaacagtgttttcaaactgctcaatcaaaggaaaagtttatctctgtgagacgaatgcacacctcacaaggctgtttctcagaaagcgtctttctagtgtttatctgagcatatttcctttttcaccataggcctcaatgtgctcccaaatatcccttcacagattctaccaaatcagtgtttccaaactggtcaaacaaaagaaaactttaaatgtgtgagatgaatgcacacatcacaaaacagtttctcagaaagcatctttctggtttttacctgaggatatttccttttttgccataggcctcaatgtgatcccaaatatcctctcacagattcgacaaaaagtgtgcttgcaaactgctcaatcaaaggaatgcttaacctttgttaaacaaattcagacattacaagcaggttttgagaaatattctttgtagtttttatgtgaagatatttcccttttcaccataggcttcaatgtgttcccttatatcccttgaaacattctacaaaagcagtgtttccaaactgctcaatcaaaagacaggtttaaccctgtgagatgaatgcacacatcacaaagcagtttctcagaaaacacctttctggtttttatctgaggatatttctttttcaccttaggcaccagtgcactcccaaatatcctttcacagattttacaaaaactgtttccaaactgctaaatcaaaaggatacttaaactatgtgagacaaatgcagacaacccatagcagtttctcagaaagcttctttctagtttttatgtgaagatatttcctttttcacccaagtcctcaatgtgctccaaaatacccttcacaggttctaccaaaatagtgtttctaagatgctcaatcaaaaaaaggtttaactctgtgagatgaatgtacacctcacagagcagttaatcagaaagcttctttctaagttttgtctgaggatatttcctttttcaccacaggcctgattgcgttcctaagtatacttttgcagattctagcaaaacagcgtttccaaactgttcaataaaaaggaagttttatctctgtgagatgaatgcacacatcacaaagcagtgtctcagaaagctcctttctagtttttatctgaagatatttcctatttcaccagattcctcaatgtgctcccaaatgtcccttcacagattctacaaaaacagtgtttccacactgctcattgaaaagaaaggtttaactctgtgagatcaatgcacacttcacaaacagattcttggaaagcttctttcaagttttcatttgaagatatttcctttttcaccataggcctcaatgtgtacccaaatatcccttcacagattctacaaaaagagtgtttccaaactgctcaaaggaaatgttttaccctgtgagatgaatgcacagatcacaaagcagtttctcagaaagcttctttctagtttttatctaaaaatatttccttctccaccattggcctcaatgcgctccctaatatcccttcacggattctagaaaaacagagtttccaaactgcttaatcaaaagaaaggattaactctgcgagatgaaagcacacatcacaaaactgtttctcagaaatctttctattttttatctgaggatatttcctttttcaccataggcttcaatgcgctcccttagatcccttgatagatactacaaaaacagtgtttccaaactgctcaatcagaagaaagatttaactctgtgaggtgaatgcacacatcacagagcagtttctcagaaagcatctttctggtgttgatctgacgatatttcctttttcaccacaggcttcaatgcactcccatatatccattgacagattctgtaaaaacagtgtttccaaacttctcaatcaaaagaaatgtttaactctgtgagatgaatgcattcatcacaaagcagtttctcagaaagcatctttctggtttttatctgaggttatttctttttcaccttaggccccaatgtgctcccaaatatgcttttgcagattctacaaaaaccgtttttccaatctgcttaatcaaaagaattcataaacactgtgagacaaatgctgacatcacgaagtggtttctcagaaagcttcattctagtttttatgtgaagatatttcctttttcgccaaaggcctcagtgtgctccaacatatcccttcacagattgtacaaaaacagtgtttccaagatgctcaattcaaagaaagttttacctctgtgagatgaatgtacacatcacaaagcagttaatcagaaatcttctttctagtttttgtctgaggatatttcctatatcaccataggcctcattgcattccccagtatactttcacagatcctacaaaaacagtgtttccaaactgctcaatcaaaagaaagcaatatctctgttagtcaaatgtacacatcacaaagcagtttctcagaaagtgtctttctagtttttatgggaagatatttactttttcaccataggcctcaatgcactccaaaatatcacttcgcagattctacaaaaacagtgtttccaaactgctcaagcaaaagaaaattttaactctgtgagatgaatgcactcatcacaaaggagattctcagaaagattctggctagttttttctgaagatatttcctttttccctaaaggcctcatagcgctcccaaatatcccttctcagattctacaaaaacagttttgccaaactgctcaatcaaaggaaatgtttaattctcttttaagaatgaattcttcacaaagcagtttctcaggaagtttctttctacttttcatctgaagatatttcctatttcaccataggcctcaaaatactccctaatatccctttgcagattctacaaaaacagtgcttccaaactgttcaatgaaaagaaaagtttaattctttgagatgaatccacacatcacaaagcactttctcagaaagctactttgtagtttttatctgaggatatttctttttcactgtaggcctcaatatgctcctaaatatcctttagcagattgtacaaaaacactatttccaaactgctctatcaaaagaaagttttaactctgtgagaagaatgaacatatcaaaaagcagattctcagaaaggtgctttcaagtttttacctgaggatattcccttttccaccatagccttcaatttaatcccaaatatcacttagcagattctccaaaaacagtgtttccaaactgctcaatcaaaagagagcttgaactctgtgagaccaatgcaaacatcacaaagcaatttctcagaaagactccttctagtttttatgagaagatatttcccttttccgcctaggcctcaatgctctccatatatcccttggaacagtccacaaaaacactgttgccaaacttctcaataaaaggtaagtaaaaactctgtgagatgaatgcacacatcagaaagtaatttgtcagaatgcatatttctagtttttatcaagggatatttcctttttcatgatatgattgtaagtgctccaaaatatcccttcacagattctataaaaacagtgtttccaaattgctcaatcaaaagaaaggcttaagcctgtgaaatgaatggactcatcacaaagcagtttctcagaaagcttctttccagtttttatctgaatatatttctttgttcaacatagacctcaactgctccaaaatgtcccgtcgcagattctacataaacagtgtttcaaaactgctcaatcaaaagaaaggtttaacactgggagatgaatgcaatcattacaaatcattttcccaggaaggttctttctagtttttatctgaagatatttcctttttcaccataggcctcaatgtgctcccttatatccctttgtagattctgcaaaaacagtgtttccagaaggctcaatcaaaaaaagatttaactctttgggaagaatgcacacataacaaagccatttttgagaaagctcctttctagtttttatctgaagatatttcctttttcaccatgggcctcagcacgctcacaaatatcccttcacagattctatgaaaacattgttgccaaactgttcaatcgaaagaaatgttgaactccttgatatgaatgtactcaagactaagcactttctcagaaagcttctttctagtttttatctgaagatatttaccttttcaccataggcctcaacatgctcccacatatcccttagcagattctgcaaaacagtgttttcaaactgcttattcaaaagaaagttttaactctatatgataaatccactcttcacaaagcagtttctcagaatgcttctttctagttttaatctgaagataattcctttttcaccataggcctcaatgtgttcccgaatatctcttagtagattttgcagaaacagtgtttcccaactgctcaatcaaaattatgttttaacactgtgagatgaatgtacacataagaaagcaggttccagaaagcttctttctagtttttacctgaagatatttcctttttcaccataggcatcaaggtactcccaaatatgccttctcagattctccaaatcactgttcccaaactgctcagtcaaaagaaaggtttaactctttgagatgaattcactcatcacaaagaagtttctccaaaagcttctttctaggttttctctgaagatatttctattttcaccattggcctcaatgcggtataaaaatcccttcctagattctacaaaaacagcatttctaaactgctcaatcaaaagaaagatttaattctgtgagaggaatgcacaaatcacaaaccagtttctgaaaaagctttttgccagtttttgtctgaagatatttccttttgcaccataggcctcaatgtgctcctaaatatcccttcacagattctaccgaagctgtgtttccaaagtactcaattgaaagaacagtttaactctctgagatgaatgcacacatcaaaaatcagttttccagaatgcttctttctagtttttttctgaagatatttcttttttttaccatagacctcaatgcattcccaaatatcccttggtagattttacagaagcagtgtttccaaactgctcaatcaaaataatggtttaactatgtgagatgaatgcacaaatcaaaaagcagtttctgagaaagtttcttcctagtattaatctgaaaatatttccttgctcaccattggcctttaagtgcttccaaatatcccttctcatattccacaaaagctgtgttgtcaaactggtcaatcaaaagaaaggtttaactctgtgagatgaatgcactcatcacaaagcagtttctcagaaagcttctttctaatttttaactgacaatatttcctttttcaccctaggcctccatgcgctcccaaatatcccttggcagattttaccaaaacagtattaccaaaaggctcaatcaaaagaaagttttaattctgtgagatgaatgcactcatcaaaaagcagcttctcagaaagcttcgttctaagtttttatctgaagatatttcctttttcaccataagccccaatgtgctaccaaatatcccttcgcagattccacataaacagtgtttccaaacagttcaatcaaaagaaaggtttaactctatgagatgaatgcactcatccaaagcagtttcacagaaagcttctttctaatttttatctgaagatatttccttttaaacaataggcctcaatgcactcccaaatatcccttcacagattctactaaaacagtatttccaaatggctcaatctaaaggtttaactctcttagatggatgcacacttcacaaagcagtttctcagaaagcttctttctggtttttgtctgaagatatttcctttttcaccattggcctcagtgggctatgatacatcactttgtagactctataaaaagtgtttcaagactgctcaatcaatagaaagttttatctctgtgagaagaatgcacatatcacaaaggggtttctgagaaagtttctttctagtttgtatctgaagatatatcctttttcaccgtagacctcaatgcattcccaaatgtctctttgcagattatacaacagcagtgtttacaaactgctcaatcaaaagaaaggtttaactctgtgagatgaatacacacatcacaaagcagtttctcaaaaagcttctttctagtttttatatgaagatatttcctttttctccataggcttcaaagtgctcccaaatatccctaggcagattccacaaaaacggtgttgccaaactgcccaatcaagagaaagttttaactctgtgagatgaatgcactcatcacaaagtagtattgcagaaaacttctttctagtttttatccaaagatatttcctttttgaccataggcctcaatgtgctcccaaatatacctttgcaaattctacaaaacagcgtttccaaaccactcagtgaaaagaaagttttaactcagtatgatgaatgcacatttctcgaagcagtttctcagaatgcttctttctagtttttatctgaagatatttcctttttaaccacaggcctcaatgcactcacgaatatccccttgcagattacacaaaaacagttcttccaagccattgaatcaaaaaaaaacaaaaagatttaactctgtgagatgtatgcacacatcccaaagcagtttcccagaaagcttctctctagtttttatctgaagttatttcctttttcaccataggccttaaagcactacgaaatatcctttctcagattccatgaaaacagtgttgtcaaacttctcaatcaaaataaaggcttcactctgtgagatgagtgcactcatactaatcagtttcccaaaaaggtctttctagtctttatctgaatatgtttcctttttaaccataggcctcaatgcactcccaaatatcccttcacagatactacgaaaacagtgtctccaaacagagcaatcaaaagaaaggtttaactatgtgagatgagtgcacacatcacaaagcattttttttcagaaagcttctttctagtttttctctgaatatattttgtttcaccatagtcctcaatgagctcccatatatctctcgtagatttgaaaaaaacaggtttccaaacagctcacactaaagaaaagtttaaccctatgagaagaatgcacacatcacaacgcggtttctgagaaagcttctttctagtttttatctgcaggtatttcctttttcaccacaggcctcaaagcgctcccaaatattcctttgcagattatacatgaacagtgtttaaaaactgctcaatcaaaagacagttttaactttgtgagatgaatgcacacatcacaaagcagtttcccagaaaggttctttccattttttatctgaagatatttgctttttcaccataggcctaaaagcatcccaaatatcccttctcagactctacaaaacagtgttgccaaactgctcaatcaaaagaaagttttaactctatgagttgaatgcacacactaccaagcagtttaccagaaagattctttatattttttatctgaagatatttcctttttcaccatagaccttaaagcacccccaaatgtcctttcacagatggcacaaaaacagggttgccaaactgcttaatcaaaagaaagttttaactctgtgagatgaatgcattcaacacaaagcagtttctcagaaagcttctttctagtttttatctgaagatatttcctttttcaccataggcctgaatgcactcccatatatccctttgtagagtctacaaaaatgtgtttccagatggcttaatcaaaagaaaggtttaactctgtgagtagaatgcacacatcacaaattgttttctgagaaaccttctttccagtatttatctgaaaatatttcctttattaccttaggcctcaatgcactctcaaatatcccttcacagattctacgaaaacagtgtacccaaactgctcaattaaaagaaaggttcactctgtgacatgaatgcacacagcacaaagcagtttctcagaaagcttctttctagtttttatctgaagttatttcatttctcattataggcctgaaattgctcctaaatatcccttctcagatccttcaaaaacactgttgccaaactgctgcgtcaaaagaaaggtttaactttgtgagattaatgcactcatcacaaagcagtttctaagaaagcttctttctagtttttatctgaagatatttcctttttcaacataggcctcaatgtgctctgaaatatccctttgctgattctaccaaaagagtgattccaaacagctcaatgaaaagaaagctttaactctgtgagacgaatgctcacatcacaaaccagtttctcagaaatcctgtttctgtttgtctctgaagatatttcctttttcaccacaggcctcaatgcactcccatatatcccttcctagattctacaaaaacagtgtttccagactgctcaatcaaaataaatgcttaactctgtgagaagaatgcagacaacacaatgcagtttctgaaaaagtttctttctagtttttctgaagatattttctttttcactataggcctcaatgcgctcctatatatcctttcatagattctacaaaaacagtgtttccagacttctcaattgaaagaagggtttaactctgtgagaagaatgcacacatcacaaaagagtttgtaagaaagcttctttcttgtttttctctgaggatatttcctttttcaccacacgccacaatgcacaacaatatgtcccttcagagatctacaaaaacagtgtttccaaactgctcaattaaaagaaagatttaactctgtgagaaaaatgcacacatcacaaagggtttctgagaaagttactttgtaatttttatctgaagatatttcatttttcatctaaggcctcaatactctcccaaatatcccttcacagattctacaaaaatagtgtttccaaaatgctccatcaaaagaaaggtataagtctgtgagaagaatgcacacatcacaaagtggtttctaagaaagatgctttctaagattcatctgaagatatttcccttttcaccattggcctcaatgcgctccaaaatatcctttcacagattctacaaaaacagtgtttccaaattgctaaatcaaaagaaaggtttgactctctgagatgaatgaactcatcacaaagcagttactcagaaagcttctttctagtttttttctgaagatatttcctttttcaacataggcctcaaaatgctcacatatatccctccacagattctacaaaaagagtgttgccaaactgctcaatcaaaaggaaggtttaactctgtgagatgaatgcacacatcagaaagtagagtctcagaaaatttgtttctactttttctctgaagatatttcatttttcaccataagactaaaatatctcccatatattccttcgtagattgtacaaaaacagtgtttccagactgctcaaccaaaggaaaggtttaactctgtgagaagaatgcacacatcacaaagcagtttctgagaaagcttctttctagtttttatctacagatatttcctttatcacggtaggcctcaatgcactcccaaatctctttgcagattctatggaaacagtgtttccaaactgctcaaaagaaaggtttaaacctgtgagatgagtgcacacataatagaacagtttccagaaaccttctttccagtttttatctaaagatatttcatttttcaccataggcctcaaagcactcccaaatatccctttgcagattgtacataaacagtgtttccaaacagctcaagcaaaagaaaggattaactctgtgagatgaatgtacatatcaaaagcagtttctcagaaaacttctttctagtttttgtctgaaggtatttcctttttcaccataggccttgaagcactcccaaatataactttgcagattctacaaaaacagagttgccaaactgtgccttcaaaaattggtttacctctgtgagatgaatgcattcatcaccaggcagtttctcagaatgattctctatagttttgatctgaagatattttcttttctacaataggactcaatgtgctcccaaatatcccttcgcagtttccacaaaaacagtgtttccaaactgctcaataaatataaagttttaactctatattatgaatttgcacatcacaaagcagtttctcagaaagcttctttctagtttttatctgaagatatttcctttttcaccataggcctcaatgcactcccagtatcccttggtagattttacagaatcagtgtttccaaactcttcaatcaaaatatggtttaacattgtaagatcaatgtacacatcacaaaacaggtttctgaaggcttctttctagtttttatctgaagatatttcttttttcaccataggctctgaagcgctcccaattattccttcacagattctacaaaaacagtacttccaaactgctctatcaaaagcaagttttaactctgtgagaaggatgcactcatcacaaagcagtttctctgaaagattctttctagtttttatgtgaagacatttccattttcaccctaggcctcaatgcactcccaaatatcccttcatagtttctagcaaaacaggttttccaacctgctcaataaaataaaggttcaactctctgtgatgaatgcacacatcaccaagcagtttttgagaaagcttctttctagtattttcctgaagatatttcgtttttcaccgtaggcctcaatgctgtcccaaatatcccttcacagattctacaaaaacagtgtttccaacctgctcaatcaaaagaaaggtttcactctctgagaagaatgcacacatcacaaagcagtttctgagaacagttttttctattatttatatgaagatatttcgtttttcaccataggcctcaatggctccaaaatatcccctcacagattctacaaaactggggttccaaattgctcaatcaaaaaaattttaactctatatgatgagtatgcacatcacaaagctcagaatgcttctttcttgtatttatctgaagatgtttcctttatcaccttaagcctcaatgcactcccaagtatcctatgacagattttacagaaacagtgtttccaactttcccaatcaagataatggtttaactctgtgagacgaatgtacacatcacaaagcaatttccagaaagcttctttctagtttctatctgaaaatattacttttttcaccataggcctcgagtcctcccaaatatccctttgcagatttataaaaacattgtttccaaactgctcaatcaaaagagacgtttaattctgtgagatgaatgcacttatcaacaagcagtttctcagaatgattctttatagtttttatctgacggtatttcctttttcaccaaaggcctcaatgtgctcccaaatatccctttgcagattctacaaagcagtgtttccaaactcctcaaccaatagaaagttttaactctttatgatgaatgtgcgcatcacaaagcggtttctctgaaagcttctttctagtttttatctgaaggtatttcaattttcagcataggcctgaaagtgctcccaaatatccctttgtagattctacagaaacagtgtttccaaactgctcaatcaaaagacagtttttagtctgggagaagaattcagtcatcaccaagcagtttctcacaaagcttctttctagtttttatctgaaggtatttcctttttcaccataggtcccaaagcattcccaaatatccctttgaagattctacgaaaacagtgtttccaaacttctcaatcaaaagaaaggtttaactctgtgagatgaacgcacacatcacaacgcagtttctcagaaacattctttctagtttttctctaaagatatttcctttttcactttaggccttaatacgctcccagatatcccttcatagattatacataaacagtgtttccagactgctcaatcaaaagaaagctttaacactgtgaaagtaagacacacatcacaaagctgtttctgagaaagcttctttctactttttgtctgaaaatatttcctttttcaccatagacctcagtgtgctcaaaaatgtcctttcatggatgctacaaaaatagtgtttccaaatagctcaatcaaaataaaagtttaaccctgtgagatgaatgcattcatcagaaagtagttttccaggaagcttctttctagtttttatctgtagatatttatttcctttttcaccataagccttgaagcactcccaagtatctcttcacagattctacagaaacagcattgtcaaactgctcaatcaaaaaaaaagtttaagtctgtgagatgaatgcactcatcaccaagcagtttctcagaaagcttctttctagtttttatctgaatatatttcattttttacaataggcctcaatgtgctcccatatttcccttcacagattctacaaaaacagtgtttccaaagtgcttgatcagaagaaaagtttaattctgtgagaagattgcacacatcacaaagcagctgctgggaaagtttctttctagtatttatgtgaagatatttcctttttcaccatatgcctcaatgcacacctaaatgtcccttcccagattctacaaaaacagtggttccaaactgctcaatcaaaaaaaaggttttactctgtgggatgaattcactgatcacaaagcagtttctcagaaagctcctttctagtttttatctgaatgaatttcctttttctccataggccctaatgcactcccaaatatcccttcacagattctacgaaaacattgtttccacactgctccaacaaagtaatttttaactctgtgaaaagagtgcacacatcacaaagcagttttgacaaggtttctttctggtttttatctgaagatatttcctttttcaccataggccccaaagtgctctgaaatatccctacacagattctacaaaaacagtgttgccaaactgctcaataaaaaaaaaaagttttaactctgtgagatgaatgcactcatcaccaagcagtttctcagaaagcttctttctggtttttatctgaagctattacctttttcaacacaggcctcaaagcgctcccaaatatccctttgcagattctacaaaaacagtgtttccagactgctcaaacaaaataaaatcttaactctatgtgatgaattcacacatctggagcagtttctcagaatgctactttctagttttttttttttttctttttgagacagagtcttgctttgtctcccaagctggagtgcagtagtgcaatctcggctcactgtaagctctgccttccgggttcacaccattcttcctcagcctcctgagtagctgggactacaggcgcccaccaccatgcccagctaatttttttgtatttttagtagagactgggtttcactgtgttagccaggatggtctcgatctcctgacctcgtgatccaccctcctcggcctccaaaagtactgggattacaggcatgagccaccgcaccgggccctgctactttctagtttttatctaaagatatttcctgtttcacctatggcttcaatgcagtcccaaatttcccttggtagattttacagaaacagtgtttccatagtgctcaatcaaaataattatttacctttgtgcaaggaatgtacacatcacaaagcagtttccagaaagcttcttttctgtttttatcagaagatatttcattttcaccacaggccttgaagcgctccaaaatatcccttcgcagattctacaaaaacagtgtttctaaactgctcaagcaaaagagaggttttactctgtgagatgaatgcactcataaaaatatggtttctcagagagcttacttctagtttttatctgaagatattttctttttcaccataggcctcaatgcgctcccaagtataccttcacagatactaccaatacagtatttccaaaatactcaatccaaagaaaggtttaattctgttagatgaatgcacaaatcacgaagcagtttctgagaaaccttctttctagtttttctctaaagatatttccttattcaccataggcctcaaagcattaccaaatatcccttcacagattctacaaaaacagtattgccaaaccacgcaatcaaaaagatttaactctgtgagatgaatgcactcatcaccaagcagtttctcaaaatgactctttccacttttaatctgaagatatttccttttcaccataggcctcagcacactcccagatatcccttcgcagattctacaaaaacagtggttccaagctgctcaatcaacagacagttttaactatatatgatgaatgtgcacatcacaaagcagtttctgagaaagcgtctttctagcttttatctgaagatacttccttttgcaccatgggcctcagtgcactcccaaatataccttcatagattctaccaaaacagtgtttccaaactgctcaatcaaaagaaaggtttaactctgtgagatgaatgcacacatcacatagcagtttctcagaaagcttttttctagtttttccctgaagatatttcctttttcactatatgcctcaatgagctcccctatacctcttcctagatactacaaaaacagtgtttccaaactgctcaatgaaaggaaagttttaactctatatgatgaatggacacatcataaagcactgtctcagcatctgtctttctactttttatctgaagatatttcctttttcaccattgacttcaaagtactccaaaatatctcctcgcatattctaccaaaacagtgtttccaaattgctcaatgaaaagaaatatttaactctctgagatgaatgcactaatcattaagtagtttcccagaaagcatctttctagtttttacctgaagatatttcctttttcaccatagtccccaatgccctcccaaatatcccttcacagattctaccaaaacagtgtttccaaactgctcaaccaaaagaaaggtttaactctgtgagatgaatgcacacatcacatagcagtttctcagaaagattttttctagtttttccctgaagatatttcctttttcactataggcctcaatgagctcccctataacccttccgagatactacaaaaacagtgtgtccaaactgcttaatcaaagaaaggtttaactctgtgagatgaatgcactcatctcaaagcagtttctcataaagcttctttctagtttttatctgaagatatttctttttcaccataggcctgaatgcactcccaaatatcccttcacagattctaccaaaacagtgtttccagacttctcaatcaaaagaaagttttaattctatgagaagaatgcatacataataaagcagtttctgataaagcttctttctagtttttatctgaatatatttcctttttcatcacaggcctcaaagagctcccaaatatcccttcacagatcctaccaaagcattgtttccaaactgatcaatcgaaagaaaggtttaatgctttgagatgaatgcacacatcacatagcagtgtctcagaaaactttctactttttctctgaagttatttcctttttcaccatagcatcaacgtgattccaaatattccttcacagatactaccaaaacagtgtttccaaaatgctcaatcaaaagaaaggtttaactctgtcatttgaatacacgcatcacaaaacaacctctcagaaagcttccttatactttctcactgcagatattttgttttctaacataggtctcaatgcgctcccaaatataccttcgcaaatattataaaaacaatgttttcaaactgcttaatcaaaagaaagttttaagtctgtgagatgagtgtactcatcacaaagcagtttctcagaaagcttctttcaagtttttctccaaagatatttcctttttcaccatagccctcaacgtgctccaaaatgtcaatttaaaggttctacaaaaccagtgtttccagacagctcaatcaaaagaaaggtttaactctgtgagataagtgcacacatcatttagaagtttcccagaatgcttgtttctagtttttatcttaagcgatttcctttctcaccataggccttaaagcactgccaaatatcctttctcagattctacaaaaaaacagtgttgcaaaactgctccatcaaaggaaaggtttaactctctgtgatgaatccactcatcacaaagtagtttctcagaatgcttcttactagtttttatctgaagatatatgttttttcaccataggcctcaatgcgctcccaaaaatccctttgcaggttctaccaaaacagtgtttccagactgctcaatcaaaagaaagatttaactctcttagaagaatgcacacctttgtggagccaagttggctgaaaaggaactgctccagtctacatctcccagcatgagtgacacagaagacgggtgatttctaaggtcaaactgggtggagcccaccacagctcaaggaggcccgcttgcctctgtaggctccacctctgggggcagggcacagactaacaaaagacagcaataacctctgcagacttaaatgtccctgtctgacagctttaaagagagtagtggttctccaagcacacagcttgagatctgagaacgggcagactgcctcctcaagtgggtccctgatccctgagtggcctaacaaggaggcaccccccagtaggggcagactgacaacacacaggaccaggtactcctctgagacaaaacttccagaggaacgatcaggcagcagcatttgcacttcaccaatatctgctgttctgcagcaaccactgctgatacccatgcaaacagtttacggacatccagcaaactccaacggacctgcaggtgagggttttgactgttagaaggaaaattaacaaacagaaaggacatccaaaccaaaaacaaatctgtacatcactatcatcaaagaccaaaggtagataataccataaagatagggaaaaaacagaccagaaaaactagaaacgttaaaaatcagagtgcctctcctcccccaaaggaacgcagctcctcaccagcaatggaacaaagcaggatagagagtgactttgatgagctgagagaagaaggcttcagacaatcaaactactctgagctaaaggaggaagtaagaaccaatgacaaagaagttaaaatctttgaaaaaaaaattagacgaatagctaactagaataaccaatgaagagaagtacttaaaggacctgatggagctgaaaaccacggcatgagaactacgtgacgaatgcataagcctcagtagctgatgcgatcaactggaaggaagggtatcagtgatggaagatgaaatgaatgaaatgaagtgtgaagagaagcttagagaaaaaagaataaaaagaaacaaagcctccaagaaatatgcgactatgtgaaaagaacaaacccacgtctgattagtgtacctggaagtgacagggaaaatggaaccaagttggaaaacactctgcaggatattatccaggagaactttcccaatcttgcaaggcaggccaacattcagattcaggaaatacagagaaggccacaaagatactcgttgagaagagcaacttaaagacacataattgtcagattcaccaaaattgaaatgaaggaaaaaatgttaagggcagccagagagaaaggttgggttacccacaaagggaagcccatcagactaacagcagatccctcgccagaaactctacaagtcagaagagagtgggggccaatattcaacattcttaaagaaaagaattttcaacccagaattttatatccaaccaaactaaccttcataagtgaaggagaaataaaatactttacagacaagcaaatgctgagagactttgtcaccaccaggcctgccctaaaagagctccaaatagaagcactaaacatggaaaggaacaaccggtaccagccactgcaaaaacatgccaaattgtaaagatcttcaaggctaggaagaaactgcatcaattaacgagcaaaataaccagctaacatcataatgacaggatcaaattcacacataacaatattaactttaaatataaatgggctaaatgctccaattaaaaggcacagactggcaaattggataaagagtcaagacccatcagtgtgctgtattcaggaaacccatctcatgtgcagagacacacataagctcaaaataaagggatggaggaagatctaccaagcaaatggaaaataaaaaaaggcaggggttgcaatcctagtctctgataaaacagactttaaaccaacaaagatcaaaaaagccaaaaagaccattacataatggtaaaggaatcaattcaacaagaagagctaactatcctaaatacatatgcacccaatacagaagcacccagattcataaagcaagccctgagtgacctacgaagagacttagactcccacacaataataatgggagactttaacaccccactgtcaacattagacagatcaacgagacagaaagttaacaaggatatccaggaattgaactcagctctgcaccaagcagacctaatagacacctacagaactctcaaccacaaatcaacagaatgtactttgttttcagcagcacaccacacctattccaaaattgaccacatagttggaagtaaagcactcctcagcaaatttaaaagaacagaaattataacaaactgtctctcagaccacagtgcaatcaaactagaactcaggattaagaaaatcactcaaaactgctcaactatattgaaactgaacaacgtgcccctgaatgcctactgggtacataatgaaatgaaggcagaaataaagatgttctttgaaaccaacgagaacaaagacataacataccagaatctctgggacgcattcaaagcaatgtgtagagggaaatttatagcactaagtgcccacaagagaaagcaggaaagatccaaaattgacaccctaacatcgcaattaaaagaactagaaaagcaagagcaaacacattcaaaagctagcagaagacaagacataactaagatcagagcagaactgaaggaaatagagacacaaaaagcccttcaaaaaatcaatgtatcccagagttggtttttgaaaagatcaagaaaattggtataccactagcaagactaataaagaagaaaagagagaagaatcaaatagacacaataaaaaatgataaaggggatatcaccactgatcccacagaaatacaaattatcatcagagaaaactataaacatctctacacaaataaagtagaaaatctagaagaaatggataaattccttgacacatacatcctcccaaaactaaaccaggaagaagttgaatctctgaatagactgataacaggatctgaaattgaggtaattattaatagctttccaaccaaaaaaagtccaggaccagatggattcccagccgaattctaccagaggtacaaggaggaagtggtaccattcctcctgaaaatattccaataaatagaaaaagaaggaatcttccctaactcattttatgaagccagcatcatcctgataccaaagccgggcagagacaaaacaagaacagagaattttagactaatatccttgatgaacattgatgcaaaaatcctcaacaaaatactggtaaaccgaattcagcaacacatcaaaaagcttatccaacatgatcaagtgggcttcatccctgggatgcaaggctggttcaacatacgaaaatcaataaacataatccagcatataaacagaatgaaagacaaaaaccacatgattatctcaatagatgcagaaaaggcctttgacaaaattcaacaacgcttcatgctaaaaactctcaataaattaggtattgatgggacgtatctcaaaataataagagttatctatgacaatcccacagccaatatcatactgaatggacaaaaactggaaacattccctttgaaatatggcaaaagacagggatgccctctctcaccactcctattcaacatagtgttggaagttctggccagggcaatcaggaaggacaaggaaatacacggcattcaattaggaaaagaggaagtcaaataattgtccctgtttgcagatgacatgattgtatatctagaaaaccccactgtctcagcccaaaatctccttaagctgataagcaacttcagcaaagtctcaggttacaaaatcaatgtgcgaaaatcacaagcattcttatacacaaataacagacaaacagagagccaaatcatgagtgaactcccattcataattgcttcaaagagaataaaatacctaggaatccaacttacaagggatgtgaaggaccttttcaaggaaaactacaaaccactgttcagtgaaataaaagaggatacaaacaaatggaagaacattccatgctcatgggtaggaagaatcagtatcatgaaaatggccatactgcccaagataatttacagattcaatgccatccccatcaagctaccaatgactttcttcacagaattggaaaaaactactttaaagttcatatggaaccaaaaaaagagcccacattgccaagtgaatcttaagccaaaggaacaaagctggaggcatcacgctacctgacttcaaactatactacaaggctacagtaaccaaaacagcatggtactggtaccaaaacagagatatagaccaatggaacagaacagagccctcagaaataatgttgcatatctacaactatctgatctttgacaaacctgagaaaaacaagcaatggggaaaggattccctatttaataaatggtgctgggaaaactggctcgcgagaagtaaagagctgaagctagatccgttctttacacgttatacaaaaattaattcaagattgattagagacttaaacgttagacctaaaaccataaaaaccctagaagaaaacctaggcattaccattcaagacataggcatgtgcaaggacttcatgtctagaacaccaaaagcaatggcaacaaaaacaaaagttgacaaatgggatctaattaaactaaagagcttctgcacagctaaagaaactaccatcagagtgaacaggcaacctagagaatgggagaaaatttttgcaagctactcatccgacaaagggctaatatccagaatctacaatgtacccaaacaaatttacaagaaaaaaacaaacaaccccatcaaaaagtggacgaagtatatgaagacagacttctcaagagaagacatttttgcagccaaaaaacacatgagaaaatgctcataatcactggccatcagagaaatgcaaatcaaaaccacaatgagataccctctcacaccggttagaatggctatcattaaaaagtgaggaaacaacaggtgctggagaggatgtggagaaataggaacacttttacactgttggtgggagtgtaaactagttcaaccattgtggaagttagtgtggcgattcctcaggaatctagaactagaaataccatttgactccgccatccgattactgggtatatgcccaaaggattataaatcatgctgctataaagacacatgcacacatatgtttattgcagcactattcacaatagcaaagacttggcaccaacccaaatgtccaacaatggtagactagattaagaaaatgtgacacatatacaccatggaatactatgcagccataaaaaatgatgagttcatgtcctttgtaaggacatggatgaaactgaaagccatcattctcagcaaactattgcaaggacaaaaaaccaaacactgcattttctcactcataggtaggaattgaacaataagaacacatggatagagtaaggggaacatcacacactgtggactgttgtgggtgggggaaggggggagggataacgttaggaggtatacctaatgctaaatgacgagttaatgtatgcagcacaccaacatggcacatgtatacatatgtaacatacctgcacgttatgcacatgtaccctaaaacttaaagtataataataataaaataggaaaagaagaatgcacacatcacaaagccttttctgagaaagcttatttctagtttctatctttagatatttcctttttcaccattggcctcagtgcgctcccaaatactccttcatagatgctaccaaatcagtgtttccaaagtgtttagtcaaaagaaagctttaactctgtgagatgaatgcacacatcacaaagaagtttctcagaaagcttttttctagtttttctctgaagatatttcctttttcaccataggcctcaatgtgatcccaaatatccctttgcagattccaccaaaacagtgtttccaaactgctaaaccaaaagaaagctttaactctgtggtttgaatgcacacaataaaaggagtttctcagaattctttctagtttctcactgcagatatttcctttttcaccataggcctcaatgagctcccaaatatcccttcacagattctccaaaaacaatgttttcaaactgctcaatcaaaagaaaagtgtaactctgtgagatgaatgcatacatcacgaagtggtttctgagaaagctcatttctcatatttatctgaatatatttcctttttcaccattggcctcaatgtgctgtcaaatatcccttctcacattctacaaaaactgttgccaagccactcaatcaaataaaagtttaactctgtgaaatgaacacaagcatcacaaagcagtttctcagaaagcttctttttaattttttttgaagagatttcctttttcactgtaggcctcaaagcactccaaatgtcaatttgcagattctacaaaatcagtgtttccaaacagctcaatcaaaagaaaggtttagctgtgtgagataaattcacacatcatgaagcagtttcccagaaagcttctttctagtttttatctgaagatctttcctttttcaccataggccttaaagcacttccaaatatcccttctcagattctacaaaaaaacagtgttgccaaactgctccatcaaaagaaaggtttaactctgtgagatgagtgcactcatcacaaagtagtttctcagaaagtttctttctagtttttatctgaagatatttcctttttcaccataggcctcaatgtgctcccaaaaatcccttcacagattctaccaaaacagtgtttccagactgcttaatcaaaaggaagatttaactctgtaagaagaatgcacgcatcacaaagtggtttctgagaaagcttctttctaatttctatctttagatatttcctttttcaccattggcctcagtacgctcccaaatattccttcgcagatgctaccaaatcagtgtttccacagtgcactatcaaaagaaagttttaactctgtgagatgaatgcacacatcacaaagaagttcctcagaaagctttatttctagtttttctctgaagatatttcctttttcactgtaggcctcaatgtgagcttaaatatccctttgcagattctaccaaaacattgtttccaaactgctcaatcaaaagcaagttttaactctgtgatctgaatgcacacaatacaaagcagtttttcagaattcttctttctactttctcactgcagacatttcctttttcaccataagccccaatgagctcccaaatatcccttcacagattgtacagaaacagtgttttcaaactgctcaatcaaaagaaaagtttaactctgtgagatgaatgcatacatgacaaagcagtttctgagaaagcttcttactagtttttatctgaagatatttcctttttcaccataggcctcactgcactcccatatatccctttgcagattctaccaaatgagtgttttcaaactgctgaatcaaaagaaaggtttaactctgtgagatgagctgcacatcacaatgtggtttcacatttattttccttctgatttttatctggaaatattgggctgttcaccataggagttaatgggttccaaaatgtctcttcacacagtctacaaaactagtgtttccaacctgatgaatcaaaagaatggtttaacccattgagctgaatccacacttaacaaagtagtttcacagatagcttcttgatagtttttatgtggagatattcggtttctcatcataggcatctatgggcttatatatgttccttcgcagattctatctaaagggtgtttccatcctgttgtatcaaaagaaaggtttaactctgttcaatgaatccacacatcacagaacacttcacagatagtttctttctagtttttatctgggaatattttgtttttcacaataggcctcaaggggctccaaaatgtcccttcacagattctgcaaaatgagtgtttcaaacctgaggattcaaagaaaaagtttaagtctgtgagataaatccacacatcaacaaaggagtttcactgatagcttttttctagtttttatctgaggatatctttttttttcaccataggccacaatgggctgtgatatgtccctagtgagattctacgaaaacaatgttttcatcctgctgaatcaaaagaaaggtttaccttggtgagataaattgaaacttcacaaagcagtttcaaagacagctcctttttagtttttatcttgggatattttgtttgccaccctaggcctcaaagggctccataatatcccatcgccaattccacaaaatgagtgtctcccaactactggatcaaaaaaaaagtttaaacctgtgagatgaattgcacatcacaaagcaatttcacagatagcttccttctggtttttatctggaaatattgggttgttcaacataggactcaatgggctccaaaaaggctcttcacagagtctacaatatgagtgattacaacctgatgaatcaaaagctatgtttaactctgtgatgtgaagtcatactttaaaatgcagtttcacagatagcttctttctagtttttatcaaggtatattcagtttttcacaataggcctctaagggatcccagatttcccttggtagattctaccaaaagagtgattccaacttcctgaatcaatataaatgtttaactctgtaagataaatctagacattgtaaataagttaaacaggtagcttctttctagtttttatctggagttattgagtttttcaccataggcctctatgggctcttaaatgtccctttgcagatgctaactaaagactttttcatacctgttgtgtcaaaagaaatgtttaactctgtgagatgaatccatacatcacaatgcagttacacatttagcttttttctactttttatctggggatattctgttttttaccataggcctctatgggctcttaaatgtccattcacagattccatctaaaaaatgtttcaaacacgctatattgacagaaatgtttaactctgttagatgaataaatacatcccaaacagtttcacaaagagcttccttctagtttttatcaggggatttttttttcattataagcctcaaaggtctctcaaatgccccttcccagattgtacaaaaaggtgtttcaaacctgctgaatcaaaagaaaggtttaactctatgagatgaatccactcaccacagagttcattcactgatcccttctttctagtttttatcttgaaatatttgtgtgtgtgtgtgtgtttttaccatagacaatagtgagctcacaaatctattttcatagattctagcaaaagagtgtttgcatcatgctgagtcaaaagaagggtttgagtctttgagatgaatccacacatcacaaagcagttttaaagatagcttctttctggtttttacctgggaatatttgatttttcaccatgtactttaatgggctcccaaatgtcactatgcagattataaaacaaaaacatttgcaacctgttgaatcaaaacaaagttttatctcactgagatgaatccacacataccaaagcagttagacagattacttctttttagtttttatctggggatattcagtttttcaccttaggcctctatgggctcccaaatgtctttccactgattctaccaaatgagtgtttccaagctactgaatcaaaagaaatgtttaactctgtgagatgaatccacacattgaaaagcagttttacagacggagtccttctagtttttatcttggaatatttggttattcaccagaggcccaaaaaccgctacaaaatatccattcatagattctaccaaaagagtgtttttaaaatgctgaatgaaaagtagggttgaactctgtgagatgaatccacacatcaaaaagcagttttacagacagagtccttctagtttttatcttggaatattcggttattcaccagaggcccaaaaaccgctacaaagtgtccattcgtagattctaccaaaagagtgtttttaaaatgccaaatgaaaagtaaggttgaactctgtgagatgaatccacacatcacaaagcagtttcacaagtagcttgtttttaattttgagatattcggtttttcaccgtagtccgtaaagtgctcccaaatgtctcttggaagattctaccaagaaagtatttccaacctgttgaatcaaaagataggtttaactcagtgagatgaattcacatatcacaaaacagtttcacagatagattccttcaagtttttatcggattatattgggttcttcaacttaggtctctatgggctcccaaatacctctctgcaggttctacaaaacgagtgtttccaagctgctgaatcaaaagaaatgtttaactctgtgagatgtatccacatatcacaaagaggtttcactgatagcttcttcctagtatttatattaagatatttaattttttaacataggcctctgtaggcttccatatgtcccttcacagattcttccaaaaaagtgtttcaaatctgctgtatcaaaagaaaggtataagtctgagatgaatccacatatcaaacagcagtttcactgataatttctttctagtttttatctgtggatattctgtttttcaccataggcctctaagggctcacaaacgtcattttgcggaatctccaaaaagagaatttccaatctgttgaatcaaaaaaggtttaactctgtgaggtgaatccacgtatgacaaagcagtttgactgatagcttcttcctagtttttatctggggatattttattttcatcataggcctcaaagtgctcccaaatgtaacttcacagattctacctgaagagggagttgcaggaagtcagggaccctgaactgagaactgaggcacccgctgaagccatggcagaagaacatgaattgtgaagatttcatggacatttattagtttcccaaattaatacttttataatttctcacacctgtctttactgcaatctctgaacataaattgtgaagatttcatggacatttctcacttccccaatcaatactcttgtgatttcctatgcctttctttactttaatctcttaatcccatcatgaccctgtgatgattctgttaactgcacaaattgtttaaacaatataaaatctgggcaccttgaaaaaagttcatagtaacaacgatgttcagggaccaagggagataaccattagttctggctgcctgagacctgggtggaacagagccatatttctcttctttcaaaagcaaataggagaaatatcactgaattctttttcttgacaaggaacagctctgagaaaaagaatgcattcctagggataggcctctgaaatgactgctccgggaaaatctgtcttttacggttgtaggtaagggatgaaataagcccagtctcccatagcaggcttattaagacgagaaaattcctgcctaataaattttagtcagaccagttgtctgttctcaaaccctgtctcctgacaagatgttattagtgacaatgtgtgcccaaaacttcattagcatttttaattttgccctagtgctgggtgatctcaccctgcctctatttgccttgtgatattttattaccttgtgaagcaagtgatctctgtgacccacaccctattcctatactccttccccttttgaaaatcactaataaaaatttgctggttttatggctcaggtggcatcatggaacctgccgacatgtgatgtctccccgggaaaatagaaaagaacccacaaagaattattggaggtcggatcccctaatatctggtgcaccaacgtggttttttccttttcccaagtgcatgtgggaacccgattcccttttgtaggtgcacagaaacgtcattggtttggtccacagaaatgcaggttcgactccctgacaactggtgagtagcctctgtatggtctgggttaactgtgggttacacggagtataaaaattatactcatctcttctatattaaactccagttaaaacagaaaagggttcgagtgcccatggaaaacatggtaaccatggaaaatatggtcactctattcagggtggtggaaaaatactgtccttggtttcctggaaaaggaactgtatatgtaaaagtaagggattgtgttggtgcaacattccaggaactggtctggacaggaaattatgttcccatcactgtttgggggtgattgggacttggtaagtgccatcctaatacctcctcaactttcctctcccgcacggccttcattatctgatcagcctctccctttgcctactcctcccccatttaatgatgctgagacttcaatatctaactctgctgactttggctgaatgctaacccctacttatcttacttcttttcatgaagagctggtacttgaagctcccgtggccatgactcacacagcccaggaccataggtatgctaattcttctctcctcaagcctccagcatcagataatggctccagcagcaaactacaatttacctataattctccaggccctcccccatccactacagcccctcaccctcctgtcattttggttcctcaaccagccactttgccatccactcaacctgcttgtctgtagccttcttcacacatggatgccagtcatcatcagtatacctctgcctcttttactccttcaatgtccctttctcacattctcaaactagtctgcatcagtatgtgggactcaatcttacctttttaaaagaatttaaggattcttgtactcagtatggtcctacttctcctaatgttaaaacagcattacaaactttgtgtggaggcaactttgcttcctttagactgggaccttttgacataagctcttctaaccccatctcagcctggcgggcagagaagggccatctccaggctcagctaaatcagactaatggcattctaattactcaggctcagctcacaggctctgatagtttctctgatacttatgcccaattaggctttgatgctcttaccagaaaacaagtaacaaaggtgtgtatgagagcttgcaatacattacgtgccccaggccaagctcctgtttcttttactactgttaaagaagttcaattacttttactacctaatatcattttaaacaaatgagataagacacgtggccctgggattggcttctgtggtgaaaaggctgcttattggattaatgtaatttctaaacaatggcccacccacaccatacacattcctggaaaaaagtttgagggcctagtagatactgaggctgaaattaatattccacataactcttatggtactccccatcagcatgtgatggaaaacatgttgttttttcctggactcggtctcagtgcaaaacatgaagggattactaaacccctcccaattactgtaaaataagacagtaatggtttaggttatcctttttagtggcagccactgccacgcctcctgatcctatccctttacaatggaaatctgacacacccgtttggattcagcagtggctgctttctaaagaaaaactggaggctttaactcactttgtttctaaacagttacaacctcgaaatgtggaaccttatctttccccctggaagtctcctgtgtttctagtaaaaaagaaatcaggcaagtggcagatggtaactgatttaagggccattaaccctttaattaaacctatgggtgccatccaagatggcatgcctgcccctgctttaatacctaaaaattagcctctcatagttattgatcttaaagattgtttttttcatatttctttacataaatcagattgtgaaaaatttgcttttgctgtaccatctatcaataagtaggagcctgcagctcattatcaatggaaagtacttcctcagggaatgctaaatagccctacaatctgccacgtttatgttgggcaattgctttcaccagttcaagcccaatttccccaggcctatattcatcattatattgatgatatttaattactggccccactgataaagaattaatggactgttatcaaattttttgccacgatgttacagagcctggattacccatcactcaggataaaatttaacagaccacccgtgttcaatatttaggaatggtggtcgataaacaacgtattcaacctcaaaaagttcacattaggagagattctttgaaaactttaaatgacttccaaaaacttttgggtgacattaattatttaagacctactttaggcattctgacctatgcgttgtctaacttgttttctgtgctttggggagattccaatctcggcagtcccagaactttgacccctgaggcttcactagaactggaattcatagaggaaagaatccagatggcccagttatctagaatacatccgtttcaaccttttcagcttctggttttcgcttcattacattcccctatgggactaatcgttcaacataatgatttagtggagtgatgttttcttcctcactatgtgtcaaaaactttgattatctggaacaactggccatcttaattggacaagctcagtgcaaaatatttaaaatttccagattttttccaaatttgactgtagttcttttaaatcaccttgaagttcagccccctttcaacattacctactgtgtcaaattcacttgactgattttattggtgttactaacaatcattatccaaagaacaaattgtttaattttataaaaatgactccttgggtggtccctcgattaaccaaagatcagcccatttgtgaaaccgttacagtgttctctgatagttcttgtaatggcaatgatggttgtgtaggtcgtacagataagcttatttttacctctatatctctgctaaaaaggtagagttgattgctgtaattactgccttacaggatttccccaaacctttaaatattgtctctattctacttaatgtgggaaagaggatatgcttgtgttttgccaggagatcaccaaaaaaaaccacagagaaaagacgtccacgtcaccaaacgccctcagacgtggtgagatctgtgccaactcctcagaagttggcacaccaaatcaaaatgggtctgactcaaaccttcctgattgcaacggagacccatctaactaatcccacttcttctgattacctttctttttctccttaaaaatccaaaaatctcaccatttatattagcaaaaaaatgacatccctttgttcttctcttcctccttcaccactaaatctcgcttacactaggttttatttaattattctcctccttatactttctctctcaccagtttcctttcacactgatttacctactacacaaaattattcttattgggcttatgtgccttttcctccacttattcgacctctcacctggaatgatgctcctgcagtaatctgcactaacgatagtgtgtggctgcctggagctgcagaagaacattgccttgctcaaccaggagaagaaggcacagcatttaatgttaccattcattataaatacccacctctgtgcctcggacatgcacctggttgtatccatctagaaattcaagtgtgggttgcttgtcttctggagaaatcagctacagaggaactggacatttggtctctggcctctccctttatcctttaaaacaaatgaaagggggagtaacgggagataccccatactttcaatataaacttgcaggaaaaccatgttctaaaaattttgaaggcccacctacaaccttaatttgggaagattgtgttaactcacatgcagtaatattaaaaaagactcgtatggtttagtaatagactgggcacaaaagggctatttaaaaaaaattgcttctctggcagaaaggaatacctgaagggtacttattttatttcttattgggagaactagaatcatcattctactttgcataggaggttcaactcattctttcccttaaaatgggaagataaaggcattaccccccgaggccttgtatgatactccccattctgagcccagaacacccagaactttggaaatttgctattgacatgtctgtactgtgagtaggggaaggggaaactattctgtctgttgtccccactactgtccccctctctcagcatcaacatagatccagacattctactttacttacctccatcctgatggttcccatatacagttttgttaagcttccttacatgctgttagtgggaaatatcaaaatttgaacgaacagtcagagtacccaatgcattaattgtcatttataaacttgtattaacttccattttgaccccaggaaaagtgtaacgtttgttcgagcttgagaaggaatgtggattcaggtaactttgcccagaccttgagaatactccctgtcaatacacttaattaatgaagtgatacagtgaattctaaaaagatctaagagatttgttttcactttaatcgctgtgatcatgggcctataccccactgctggaatggcactacatcaatctactcaaacagctccttttgttaatgattggcaagccaattccactcaaatgtggaattctcaacaaggcattgaagaaaaattcgctaatcaaatcaatgacttaagacagtgtgttctgtcccattgatctatatctctgttttggtaccagtaccatgctgtttgggttactgtagccttgtagtatagtttgaagtcaggtagagtgttgtctccagctttgttcttttggcttaggattgacttggtgttgcaggctcttttttggttccatatgaactttaaagtagctttttccaatactgtgaagaaagtcattggtagcttgatggggatggcattgaatctataaattaccttgggcagtatggccattttcacgatattgactcttcctacccatgagcatggaatgttcttccatttgtttgtatcctcttttatttcattgagcagtggtttgtagttctccttgaagaggtccttcacatcccttgtaagttggattcctaggtattttattctccttgaagcaattgtgaatgggagttcactcataatttggctctctgtttgttattggtatagcgccgcatatctacaactatcagatctttgacaaacctgacaaaaacaagaaatggggaaaggattccctatttagtaaatggttctgggaaaactggctagccatatgtagaaagctgaaactggatcccttccttacaccttatacaaaaattaattcaagatggagtaaaggcttaaaagttagaactaaaaccataaaaaccctagaagaaaacctaggcgataccattcaggacataggcatgggcaaggacttcatgtctaaaacaccaaaagcaatggcaacaaaagacaaaattgagaaatgggatctaattaaactaaagagcttctgcacagcaaaagaaactaccatcagagtgaacaggcaacctacaaaatgggagaaaattttcacaacctactcatctgacaaatggctaatatccagaatctacaaagaactccaacaaatttacaagtaaaaagcaaacaaccccatcaaaaattgggcaaaggatatgaacagacacttctcaaaggaagacatttatgcagccaaaagacacatgaaaaaatgttcatcatcactggccatcagagaaatgcaaatcaaaaccacaatgagataccatcttacaccagttagaatggcaatcattaaaaagtcaggaaacaacaggtgctggagaggatgtgggaaataggaacacttttacattgttggtgggactgtaaactagttcaaccattgtggaagtcagtgtggcaattcctcagggatctagaactagaaataccatttgacccagccatcccattactgggtatatacccaaaggactataaatcatgctgctataaagacacacgcacacatatgtttattgtggcactattcacaatagcaaagacttggaaccaacccaaatgtccaacaatgataggctggcttaagaaaatggggcatatatacaccatggaatactatgcagccataaaaaatgatgagttcatgtcccttgtagggacatggatgaaattggaaattgtcattctcagtaaactatcgcaagaacaaaaaaccaaacaccacatgttctcactcatagatgggaattgaacaatgagaacacttggacacaggaaggggaacatcacactccaggtacagttgtggggttgggggatgggggagggatagcattaggagatatacctaatgctaaatgatgagttaatgggtgcagcacaccaacatggcacatgtatacatatgtaactaacctgtacattgtgcacatgtaccctaaaacttaaggtataataataataataataaaaagaaaaaaaagacaatgtgttatttggcttggagatcgggtaatgagtctcgaccattgcatgcaaattcagtgtgactggaatacttcagatttctgtataaccgtgtactcctataaagagactgatcattcatgggaaatggtcaaaggacaccttctgggtagggaaggtaatttatcattggacataactgaattaaaaacaaatttttgaagcctctgaatctcacttatccattatgcctagagctgaggcattagatcatgtggtagaaaacctttatggattaaaccccacgacttggattaggtctattgtgggctccactgaagtaaattttggaattatgtttctctgtttatttgcttgtctttagtgtgccagaccagtcaaagaatccagtgtcaaaatggagagaatgagcaagtgttcatcaacatggcacatttatataaaaagagaaggagaaatgttgcaggaagtcagggaccctgaatggagggactggctgaagccgtggtagaagaacataaattgtgatgattttgtggacatgtattagttccccaaattaatacttttataatttcttacatctatctttactgcaatctctgaacataaattgtgaagatttcatggacatttatcacttcccaaaccatacttgtgtgatttcctatgcctctgttaaatctcttaatcccatcatcttcataagctgaggatgaatgttgcctcaggaccctgtgatgattgtgttaactgcacaaattgttaaaacattatgcaagctgggcaacttgaaaaaagcacaagataagagagatgttcagggaactagggagataaccattatgtctggctgtctgagagctgggcagaacagaaccatatttctcttttttcaaaagtaaataggagaaatatggctgaattctttttctcagcaaggagcagccctgagaaagagaatgcattcctaggtgtaggcctttgaaatggccactctgggaatgtctgtcttttatggatgtagacaagggatgaaataagccctggtttcccgcagtgctctgaggcttattaggatgaagaaatacccacctaataatattggtcagaccagttgtctgttctcaaaccgtgtctcctgataagatgttatgaacaacaatgtgtggccaaaacttcattagcaattttaatatcaccccagtcctgtgatcttgccctgcctgcatttgccttgtgatattttattaccttgtgaagcacgtgatctctgtgacccacatcttattcgtacataccctcccattttgaaaatcattaataaaaacttgctgggtttatggctcagggggcatcacagaacgtgccaacattgtgatgtctcccccagacactcaactttaaaaatttctctctttttactctttccctttatttcttcgatgggttgacatttaggggaaatagaaaaggactcacgttgaaatatcaggagctgattttcccctgatagagagtttcaaacccactatatcaaaatcaaaatttaattctgtaagatgaatacacacatcataaagcagtttcaaagacagcttttttctagtttttatctggggatatttggtttttcactataggcctcaaaaagctcccaaatatttcctcatacattctaaaaaaagagtgtttccaacatgctgaataaaaagaaatgttcaacattgtgagatgaaaccacatatcaaaaagcagtttaacaaagagtttattcctagttgttatctgtggacatttgatttctcaccaaaggactcaaaaggctttcaaatgtcccttcgcagactctacaaaagtactgtttgcaacctgctgaattaaaatgaagatttacctctcttggatgagtccatacatcacaaagaagtttctatgggttcttaaatgtctctttgcagattctacctaaagagtgtttcaaatctgttttaatgaaagaacaatttaactctgtgagataaatccacacattacaaagctgttttacagatagcttttttctagtttttatctggggatatttggtttttcaccataggccaccatgggctcccaaatgtcccttcatggattctaacaaaagagtgtttacaacctgttaaatgaaaagaaaggtttcaaactgtgagatgaatccacacatcacaaggcagtttcacagatagcagttttctagtgtttatctgggaatattcggtttttcaccacaggcctccatggattctcaaaagtttcttcacagattgtacaaaaagagtgtatgcaacttgctgattcaatagacaggtttatctctgtgaaatgaatccacagatcacagggctgtttcacagatcacttctttcttgtatgaatctgtgaacatttcgtttttctctgtaggtctcaaaaagctccatttttctctttgcagatcctgtgaaaacagtgtttcaaacatgatgtatcaaaagaaacgttgacctctgtgagaagaatccacacatcacaaagaagtacacagatagctacttcctagtttttatatgaggattttttttttaaccatacacctcaaagggcttcaaaatgccccatgtagattctacacaactagtgtttccagcctcctgaattaaaggaaaggtttatctctgtgagatgaatccacacatcaaaaaagcagtttcacaaacagcttctttctggtttgtgtctgggggtattcggtttttcactgcttcctgaaagggtttccaaatgtacctttgcagattccataaaaagagtgtttttaatctgctgaatcaaaagaaagatttaactttgtgatttcaatccagatatcacaaagcagtttcacagatagcttctttcagtttttatctggggatatttggtcttttaccataggcctctaaggactctgaaatgtcccttgaaagattctaccataagagtttttccaatttaccgagtcaaaagtcatgtttaactctgtgaaacgaatccacacatcacaaggcagtttcacagatagcttctgtcttgtttttgtctggaaatattcggtttttcaccaaaaaaatcatgggcttcaaaaagtccctttgcatatcctacgaaaagaggatttcacacctgctgaatcaaaacaaacgtttaattctgtgaggtgaatccacacatgacatgcagtttcagagacactttctttctagtttttatctgggcatattctgtttttcaccgtaggcctctacggtctcccaaatatcccttcgcttattctaactgaagagtatttcaaacttgctgaatcaaaagaaaggtttaactctgagtggtgaatccacacataacaaagcagttccacaggtagcttccttctggttttcaactggggatattgtttttttcaccatagcctcaatggacttcaaaatgtcccttctcaggttctacaaaacaagtatttccaaccagctgagtcataggacaggcttatctctgtgagacgaatccacacatcacaaagcagtttcacaggtagctactttgtagttttatctgtggatattctgtttttcaccatagggctcaaataccttccaaacctcccttctcagattctgccaaaaagtgtttccaacccacttaatcaaaagaaagatttaactctgtagatgaatccaaacatcgcagagaagtttcacaggtagcttctttctagtttatatatgggaatattcagtttttcaccataggtctcaatgggctcccacatgtccctttcccgattttaccaaaagagtgtttccaaactgctgaatcaatagaaaaatttaaatctgtgagtagattccatacatcacaaagtagtttcactaaaaccttctttctagtttttatctttcaatattcaatttttcacagtgtgccacaatgggctggcaatgtcccttcacagattctagcaaaagaatgtttgcaaactgctgaatcaaaagaaaggtttaagcctttgggctgaatccacacttaacaaagcagtttcacagagagcttctttgtactttttatgtggggatatccagtttttcaccataggcatctgtgggcttataaacgctcattcacaggttctatctaaaaagtatttctatcctgctgtatcaaaagaaagatttaactctgtgcaatgaatctacacatcacaaagcagtttcactgatagcttctttctaatttttatttggagatattcagctttccactataggcttaaaagggctcccaaatgtccctttgcagattctaccaaaagagtgtttccaacctgctgaatcaaaagataggtttaactcagtgaggtgaatccatacatcacaaagccgttacatatttagcttatttctactttttatctggagatattctgtttttcaccatagacctctatgggctcttaaatgtcccttcacagatactatttaaaaaatgtttgaaccatgctatattgacagaaatatttaactctgttagatgaataaacacatctcaagcagtttcacagtacttactttgtagtttttatctggggatttttgattcttcattacatgcttcaaagttctctaaaatgcccattcgcagattcttcaaaaaggtgtttacaatctgctgagtcaaaagaaaggtttaacactgtgagatgaatccacacataggaaagcagttacacagacagcttctttctactttttatctggggatattcagtttttcacctcaggcctctatgggctcccaaatgtctttccactgattctagcaaacaagtgtttccaagcgactgaatcaaaaggaatgtttaactctgtgaggtgaatccacatatcaaaaacagttttacagacagagtctttctagtttttatcttggaatattcggttactcaccagaggccagaaagcctctacaaaatgtcccttcatagattctaccaaaagagtgtttttataatgctgaatgaaaaggatggttgaactctgtgagatgaataaatacaagacaaagcagtttcacagatagcttgtttctagttttaatttgcagatatttggtttttcactgtaggctgtaaagggctcccaaatgtccctttgcagattctaccaagacagtgttttcaatctgctgaatcaaaagataggtttaacacagtgagatgaatccacacatcacaaagcagtatcacagatagattccttcgagtttttagctggggatattgtgtttttcaccttaggtctctatgggctcccaaatgtcactctgctggttccacaaaacaagtgtttccaagctactgaatcaaaagaaatgtttaaatctgtgagttgaatccacacatcacaaagaggtttcactgatagcttcttcctagtatttatatgaagatattcagttttttaacataggcctctatgggcttccatatgtcccttcacagattcttccaaagaagtgtttcaaatctgctgaatcaaaagaacggtttacctctgtgagatgaatccccatatcacaaagcagtctcactgataccttctttctcgtttttatctgtggatattctgtttttcaccataggcttctaagggctcacaaacgtccttttgcagaatcctcaaaaagaaggtttccaatctgctgaatcaaaagaaaggtttaaatctgtgaggtgcatccacacagtagaaagcagtttcacagatagcttcttacttgtttttatctggagttattttatttttcaccataggcctcaaagtgctcccaaatgtacctttgtagaatctacctaaagagagtttccaacctgttgtatcaaaatgaaattttaactctgtaagatgaatgcacacatcacaaagcagcttcaaagacagattttttcttgtttttatctgggaatattctgtttttcaccataggactcaaaaactcccaaatgtttcctcatacattctaaccaaagagtgtttccaacctgctgagtaacaagaaaggttcaacaatgtgagatgaaaccacatatcaaaaagcagtttaacagatagttttttcctagttgttatctgtggacacttagtttctcaccaaaggactcaaagggctttcagtgtccctttgcagactatgcaaaaatactgactgcaacctggtgaattaaaagaaagattttcttctcttggattaatccacacattacaaagaagtttcacagatagcctctttctagttttgatcttgtcatagttggtttgtcactatggactatggtgggcttgcaaatatcccttcaaagattctagaaaaagagtgtttttaaaccagtgaatcaaaaacaagtttaaccctttgagatgaatccacatatcactaagcagtttcacagagagcttctttgtagtttttatctgaggatattctgtttttcaccacaggcctctatgggttcccaaacctcccatcacagattctaccaaaagactgcttgcaatctgcttaataaaataaaaggtttaactctgtgagatgaatccacacatcataaaacagtttgacagacagcttctttctagattttatctgggaatattctgtttttcaccgtaggcctctatgtgtccccaaatgtcccttcacagattctacctaaagagtgtttcaaacatggtttatcaaaagaaaaattttactgtgtgaggtaaatccacacatcacaaagctgttttacagatagcttttttctagtttttatctcgggatattttgtttttcaccataagcccccaagggctctcaaatgtccctttgcagattctaacaaaagagtgtttccaagctgtgaaatgaaaagaaagatttgacactttgagaggaatccacacatcacaaagcattttcacagatagcttttttctagtgtttaaagtttcaccaataacttttttctagtgtatatctggggataatcagtttttcaccataggtctccatggactcccaaaagtttcttcactgattctacagaaagaatgtatgcagcttgctgattcaatagatgggtttatctctgtgaaatgaatccacagatcacaggactgtttcacagatagcttctttctagtttttatctgtgaacattgggtttttcatcataggcctcaaaaagctcccaaatttctctctgtggattctacaaatcagtgtttccatcatggtgtatcaaaagaaacgtttatctctgagatgaatccacacatcacaaagatgttcacagatagcttcttcctagttttatctgggaatatatatatatatatatatatatatatatatatatatatattttaacataagcctcaaagggcttcaaaatgctgcaagaagatgctacaaaatgagtgtttccaacctgctgaatcaaaggaaacgtttatctctgtgagatgaatccacacatcaaaaaagcagtttcacaaatagcttctttctggtttttatctggggatattcagtttttcactatattcctgaaagggttcccaaatgtaccctcaaagattctataaaaagagtgtttttaacctgcttaatcaaaagaaagatttaactttgtgatttgaatccagacatcagaaagcagtttcacagatagcttctgtctatcttttatctgaggatacttggttttttatcataggtctctaagggctccaaaatgtacctggaaaggttctgccataggagtgtttccaatttactgaatcaagagaaatgtttaattctgtgaaatgaatccacacatcacagggcagtttgacaggttgcttctttctactttttatcaagaaatatttgctttttcaccataaacctcaatgggcttcgaaatgtcccttcctaccaaaagagggtttcacacctgctgaatcaaaacagacgtttatttctgtgaggtgaatccacacatcacacagcagttacacagacagcttctctctagtttttatctgaggatactctgttttttagcataggcctctaaggtctcccaaatgtcccttcccatattctacttaaagagtatttcaaatttgctggatcaaaagaaaggtttaactctgagtggtgaatccacacattaaaaagcagtttcacaagtagcttccttctagtttgtaactggggatattgtttttttcacaatagacctcagtgggcttccaaatgtcccttctcaggttcttcaaaatgagtgtttcccacctgctgaatcaaaggaaaggcttatctctgtgacatgaatccacgcatcacaaagcagattcactgatagcttctttatagtttttattttgaaatatatatatatttttaccatcgactacagtgggctcacatatctctttttgcagattctagcaaaagagtgtttccatcatgctgagtcaaaagaaaggtttaagtttttgagatgaatccgcacatcacaaagcagtttcaaagactgcttctttctggtttttatctggggatatttggtttttccctatcagcctcaaaaaactcccaaatatttcctgatacattctaaccaaagagtgtttccaacctgctgagtaaaaagaaaggttcaacactgtgagatgaaaccacatatcaaaaagcagtttaacagatagtttcttcatagttgttatctgtggacaccaaaggactcaaaaggctttcaaatgtcccttcacaaactctgcaaaagtactgattgcaacctgctgaattaaaagaaaggtttacctctctggaatgaatccacatatcacaactttcacagatagcctctttctagttttgatcttgggatattcggttagtcactatggactacagtgggatcaaaaatgtccctttacagattctagaaaaagagtgcttctaacccagtgaatcaaaaacaagtttaaccctttgagatgaatccacatatcactaagctgtttcacagagagcttctttctagtttttatctggggatattctgtttttcaccataggcctttggggttcccaaacttcccttcacagattctaccaaaagagtgtttccaacatgcttaacaaaagaaaaggtttaactctgtgagatgaattgacacatcacaaaagagtttgacagatagcttctttctagattttatctggggacattctgtttttcactgtagacctctatgtgttcccaaatgtcccttcacagattctacctaaagagtgtttcaaacatggtttatcaaaagaaaaacttaactctgtgagataaatccacacatcacaaagctgttttacagatagcttttttccagtttttatctcgggatattttgtttttcaccaaaggcccccaagggctctcaaatgtccctttgcagattctaacaaaagagtgtttccaagctgttaaatgaaaagaaagatttgacactttgagatgaatccacacatcacaaagcagtttcacagatagcttttttcttgtgtttatctggagatattctgtttttcactataggcctccatggactcccaaaagtttcttcacagattctacaaaagagtgtatgcaacttgctgattcaatacacaggttaatctctgtgagatgaatccacagatcacagggctgtttcacagaaagattctttctagtttttatctgtgaacattgggtttttcaccatagacctcaaaaagctcccaaatttctctttgcagatactacgaaaacagtgtttcaaacacactgtatcaaaagaaacgttgacctctgttagatgaatccacacatcacaaagaagttcacagatagcttcttcctagtttttatatggggatattgtgggcttttttgtcatagacctcaaagggcttcaaaatgccccatgtagattctacaacacgtgtgttttcaacctgctgaatcaaaggaaaattttatctctgtgagatgaatccacatatcacaaagaagttcacagatagcttcttccattttttatggtgatattattattattatttttttaccataggccacaacagactccaaaatgccccatgcagattatacaaaacgagtgttttcaacctgctgaatcaaaggaaagttttatctctgtgagatgaatccacacatccaaaaagcagtttcccaaatagcttctttctgatttgtatctgggggtattttgtttttcacaacatttctgaaattgttctcaaatgtaccttcacagattctataaaatgagtgcttgcaaactgctgaatcaaaagaaaggtttacctttctgatttaaatccagatatcattaagcagtttcacagatagcttctttctagtttttatacttttttttttttttttttttttttaccataggcctctaagggctccaaaatattccttgaaagattctaccataacagtgtttccaattttcagaatccagagaaatttttaattctgtgaaacgaatccacacatcacaaggcagtttcacaggcagcttctttctagtttttttctagaaatatttggtttttcaccataaacctcaatgggcttccaaatgtcccttcgcatatcctaccgaaaaagggtttcacatccactgaatcaaaacaaacatttaattctgtgaggtgaatccacacattacacaacagtttcacagacaccttctttctagtttttatctggggatattctctttttcaacataggcctctatggtctcccaaatgtccctttgcatattctaactgaagagtattgcaaatttgctggatcaaaagaaaggtttaactctgagtggtgaatcctaacatcacaaagtagtttcacaggtagcttccttctagtttgtaactggggatattgtctttttcaccatatgtctcaatgggcttcatatgtctcttctcaggtactgcaaaatgagtttttgcaacctggtgaatcaaaggaaaagcttatctctgtgagatgaatgcacacatcaaaaagcagtttcacagatagctactttgtagtttttatctgtgaatattctgtttttcaccatagacctcaaaaagcttccaaatctcccttcgcagattctgccaaaaaagtgtttccaacgtgatgaatcaaaagaaaggcttaactctgtgaaatgaatccacacattgcagagcagtttcacagatagcttccttctagtttttatctggaaatattcggtttttcaccataggtctcaatgggcttgaacatgtccctttcccaattttgccaaaagagattttccaaactgctgaatcaatagaaaagtttaactctgtgagtaggatccacacatcccaaagtagtttcactaaaagcttcttgctagattttatcttcgaatattcaattttccacagtgtgctacaatgggcttgtaaatgcccctttgcagattctagcaaaatagttttcgcaacctgctgaatcaaaagagagctttaaacctttgagctgaataaacacttaacaaagcagtttcacagatagcttcttgatagtttttacgtggggttattcggtttttcaccataggactctatgggcttataaatgttccttcacagattctatgtaaagagtgtttccatcctgctgtatccaaagaaaggcttagctctgtgcaatgaatccacacagcacagagcacttcacagatagtgtctttctagtttgtatctggggatactttgtttttcacagtaggcttcaatgggctccaaaatatcccttcacagattctgccaaatgagtgtttcaaacctgcagaatcaaagaacggtttaagtctgtgaggtaaacgcacacttcaaaagaacagtttcactgatagcttctttctagttttcatgtagggacatttggtttttcaccataagcctaaaagggctcccatgtgtccctttgtagattctacaaaaagaatgtttccatccttttgaatcaacagagatttaactctgagataaaggtaaaaatcacaatgaagtttcagaaatagcttctttctggtttttatctggggatatctgttttttcaccataggcctcaatgggctatgataggtctgtgtgcagattctaccaaaagagggtttacaacgtgctgaatcaaaagaaaggtttaactctgtgagataaatccaaacatcacaaagcagtttcactggtagctccttttcaggttttatcttgggatgtttggttttcaaccataggctttaatgggctctgaaatatcccatcactgattctacaaaattagtgtctccaacctacttaatcaaaaacaaaaattttaaatttgtgagacgattcacacatcacaaagcagtttcactgatagctttcttctgctttttatctggaaatattgggttgttcaacataggacttaatgggctccaaaatgtctcttcacaaagtctacaaaaagagtgtttccaacctgatgaatcaaaagaaacgtttaactctgtggcatgaatccacactttacaatgcagtttcacagatagcttctttccagtttttatcaaggaatattcagtttgtcacaataggcctctaagggatcccagaattcccttggaagattctatcaaaagagtgattccaacttcctgaatcaaaataaatgtttatctctgtgagatgaatccagacattacaaataagctaaacaggtaccttcttcctagtttttatctgaagttattcagtttttcacaataggcctctaagggatcccaaatgtcccttggcagattctaccaaagggtgattccaacttgctgggtcaatgtaaatgtttatctctgttagataaatacagacattacaaataagttaaacaaatagcttctttcttgtttttatctggagttattgagtttttcaccataggcctctgtgggctcttaaatgtcccttcgcagacactaattaagactgtttcatacctgttgtgtcaaaagaaaggtttaactctgagaggaatccatacctcacaatgtagttacattttagcttttatctactttttgtctggggatattctatttttcaccataggcctctatggactcttaaataccccttcacagactctatctaaaaaatgtttcaaacatgttatatagacagaaaaattaaactctgttagatgaataaacacatcccaaacagtttcacaaagagcttccttctagtttttatctggggatttttggatttttttttgttttcttattatactttaagttttagcgtacatgtgcacaacaaacgtgccggtttgtaacatatgtatacatgtgccatattggtgtgctgcacccattaactcatcatttagcattaggtatatctcctaatgctatccctcccccatcctcccaccccacaacaggccctggtgtgtgatattcccctgcctgtgtccatgtgctctcattgttcaattcccacctatgagtgagaatatgcggtgtttgtttttttgtccttgtgatagtttgctgagaatgatgtttccagcttcatccgtgtccctacaaaggacaagaactcataattttttatggctgcatagtattccatggtgtatatgggccacattttcttaatccagtctatcattgttggacatttgggttggctccaagtctttgctattgtgaatagtgccacaataaacatacgtgtgcacgtgtctttatagcaacatgatttataatcctttgggtatatatccagtaaggagatagctgggtcaaatggcatttctagttctagatccctgaggaattaccacactgacttccacaatggttgaactagtttacagtcccaccaacagtgtaaaagtgtttctatttctccacatcctctccagcacctgttgtttcctgactttttaatgatcaccattctaactggtgtgagatgttatctcattccttctcctgcctgattgctctggccagaacttccaacactatgttgaataggagtggtgagagagggcttccctgtcctgttcctgctttcaagggaatgcttccagtttttgtccattcagtatgatattagctgtgggtttgtcatagatattattatttgagatacgtcccatcaatacctaatttactgagagtttttagcatgaagtgttgttgaattttgtcaaaggccttttctgcatctattgagataatcatgtggtttttgtctttggttcttgtttatatgctggattatgtttattgattttcgtatgttgaaccagccttgcatcccagggatgaagcccacttgattatggtggataagctttttgattgctgctggattccgtttgccagtattttattaaggatttttgcatcgatgctcatcaaggattttggtctaaaattctcttttttggttgcgtctctgcccggctttggtatcaggatgatgctggcctcataaaatgagttaggcaggattccctctttttctattgattcgaatagtttcagaaggaatggtagcagctcctccttgtacctctggtagaattcggctgtgaatccatctggtcctggactttttttggttggtaaactgttagttattgcctcaatttgagatcctgttattggtctattcagagattcaaattcttcctggtttagttttgggaggatgtatgtgacaaggaatttatccatttcttctagattttctaatttatttgcatagaagtgtttatagtattctctgatggtagtttgtatttctatgggattggtggtattatcccctttgtcttttttattgcatctatttaattcttctctcttttcttctttattagtcttgctggccgtctatcaattttgttgatcttttcagaaaaccagctactggattcattgattttttgaagggttttttgtgtctctattccttcagttctgctccgatcttagtaatttcttgccttctgttagcttttgaatgtgtctgctcttgcttttctagttcttttaattgtgatgttagggtgtcaattttggatctttcctgctttctcttgtgggtatttagtgctgtaaatttccctctacacactgctttgaatgtgtcccagagattctggtatgttctgtctttgttctcgttggtttcaaagaacatctttatttctgcgttcttttcgttatgtacccagtagtcattcaggagcaggttgttcagtttccatgcagttgagtggttttgagtgagattcttaatcctgagttctagtttgattgcactggggtctgagggacagtatgttataatttctgttttttgcatttgctgaggagtgctttacttccaactatgtggtcaattttggaataactgtgatgtggtgctgaaaatagtgtatattctgttgatttggggtggagaattctgtagatgtccatcaagtccacttggtgcagagctgagttcaattcttggatttcctttttaactttctgtttcattgaactgtctaatgttgacagtggggtgttaaattctcccattagtaatgtgtgggagtctaaatatctttgtagatcactcaggacttgctttatgaatctgggtgctcctgtattgggtgcatatatatttagaatagttagctcttcttgttgaattgatccctttaccattaagtaatggccttctttgtctcttttgatctttgttggtttaaagtctgttttatccaagactaggattgcaacccctgcctttttttgttttccatttgcttggtagatcttcctccatccttttattttgagcctatgtgtgtctctgcacattagatcggtttcctgtatacaacacactgatgggtcttgactctattcaatttgccagtctgtgtcttttaattggagcatttagcccatttacatttaaggttaatgttgttaagtgtgaatttgattctgtcgttatgatgttagctggttattttgcttgttagttgatgcagtttctttctagcctcgatggtctttacaatttggcatgtgtttgcagtggctggtaccagttgttcctttccatgtttagtgcttccttcaggagctcttttagggcagacctggtggtgacaaaatctctcagcatttgcttgtgtgtaaaggattttatttctcattcacttatgaagcttagtttggctggatatgaaattctgggttgaaaattcttttctttaagaatgttgaatattggcccccactttcttctggcctgtagagtttctgccacgaggtcagctgttagtctaaagggcttccctttgtgggtagcccgacctttctctctggctgcccttaacatttttgccttcatttcaactttggtgaatctgacaattatgtgtcttggaattgctaatgtcgaggagtatctttgtggtgttctatgtatttcctgaatttgaatgttggcctgccttgctagattggggaagttctcctggataatatcctgcagagtgttttccaacctagttctactctccccattacttttaggtacaccaatcagacgtagatttggtcttttcacatagtcccttatttcttggaggctttgttcacttctttttattcttttttctctaaacttctcttcttgcttcatttcattcatttgatcttccaccactgataccgtttcttctagtagatcgattcagctactgaggcttatgcattcgtcacgtggttcttgtgccatggttttcagctccatgaggtcctttaaggacttctctgcattgattattctagttagccattcgtctaatttttttcaatgtttttaacttctttgccatgggtgcacacttcctcctttagctcagagtagtttgattgtctgaaaccttcttctctcaactcgtcacagtcattctccatcaagctttgttccattgctgttgagtagctgtgctcctttggaggaggagaggcactctgatttttagagtttccagtttttctgctgtttttccccaatctttgtagttttatctacttttggtctttgatgatggtgacttacagatcacctttggtgtggatgtcctttctgtttgttagttttccttctgacagtcaggaccctcagctgctggtctgttggagtttgctggaggtccactccaaaccctgtttgcctgggtataagcagcagaagctgcagaacagcagatattggtgaacagcaaatgttgctgtcttatagttcctctggaagttttgtctcagagtagtacctggctgtgtgaggtgtcagtcttcccttactttggggtgtctcccagttaggttacttgggggtcagggaccaacttgtggaggcagtctgcccgttctcagttctcaagctgcatgctgggagaacgactattctcttcaaagctgtcagacaggaatgtttaagtctgcagaggtttctgctgccttttgttcagctatgcattgccccgagaggtggagtctacagaggcaggcaagcctctttttgctgcagtcggctccacccagtttgagcttcctggccactttgtttacctactccagtttcggcaatggtgggcgcctctctcccagcctcactgctgccttgcagtttgatctcagactgctgtgctatcaatgagagaggctccatgggtgtaggaccctcctagccaggcgctggatataatgtcggtgtgccatttgttaagaccattggaaaagtgcagtattaggctgggagtgacccgattttccaggtgccatctttcacctctttctttgattcagaaagggaattctctgagcccttgcatttcccaggtgaggcgatgcctcacccagctttggctcacactcggtgcagtgcaccggctgtcctgcacccactgtctggcactacccagtgagatgaacctggtacctcagttggaaatgcagaaatcacccgtcttttgtgtcactcacactgggagttgtaaactagagctgttcatattctgtcatcttggctccaacccctttggtttttcgctataagcttcaaatatctctcaaaagtcccttcacagattctacaaaaaggtgtttccaacctgctgaatcaaaagaaagtttaactctgtgagataaatccacaaatcacaaagcagattcactgatagcttctttctaatttttatcttgaatttttttttctttttaccatagactacaatgggttcatgaatctccttttgcagattgttgcaaaacagcatttccaacatgttgagtcaaaagaaaggtttaaatcattgaaatgaatccacacatcacaaagcagtttcaaagatagcttctttgttgttttcatctgaagatatttgatttttcactaaaggctttaataggcccccaaatgtcactatgtagattataaaacataagtatgtgcaacctgctgaatcaaaagaaaggtttaactctgtgagatgaatccacacataacaaagcagttacacagatagtgtctttgtagtttttatctggggatattcagtttttcaccttaggcctctatgggctcccagatgtctttccaccaattctaccaaatgagtgtttccaagttactgaatcaaaagaaatttttaaccctgtcagattaatccccacatcaaaaggcaattttacacacagagtctttctagtttttatcttggaatatttggctattcaacagaggccaaaaaactgctacaagatatcccttcatagattctaccaaaagattgtctttaaaatgctgaaagaaaaacaaggttgaactctgtaagatgaatccacacatcacaaagcagtttcaccaatagcttccttcctgtttttatttggagatattttgtttttcactgtaggccttaaagggctcccaaatgtccgtttgcagattgtatcaaaagagtgtttccaacctcccgaatcaaaagatacatttaactcagtgagataaatccacacatcacaaagcagtttcacagacagattccttcaagtttttatcttgggataatgtgtttttcaccttaggtttctatgggatcccaaatgtctctcttcagtttccacaaaacgagtgtttccaagctgctaaatcaaaactaaggtttaactctgtgagatgtatccacatatcacatagagatttcactgatagcttcttcctagtatttgtatgaagatatccggtttttgaacataagcctctgtgggcttccatgtctcccttcccagattcttccaaacgtgtttcaaatctgctgtatcaaaagaaatgttttactctgtgagatgaatccaatatcaaaaagcagtttcactgataccttctttctagtttttaactgtgggtattctgtttttcactgctggcttctaagggcccacaaacgtccttttgcagaatctccaaagacagggtttccaacctactgaattggaaaggtttaaccctgtgaaatgaatccacacattactaagcagtttcactgatagcttctttctaatttttcctggggttattttattttttgctataggcctcaaagtgctcctaaatgtaccttcccagattctacctaaagagagtgttgggggaagtcagggaccccgaatggagggaccagctgaaggtatgcagaaaaacataaattgtgaagatttcatgaacatttattagttccccaaattaacacttttataatttcttatgcttgtctttactgcaatctctgaataaaaattgtgaagattttatggacatttatcactttcccagtaaatggtcttgtgatatcctatgcctgtcttttctttaatctcttaatcctgtcaccttcataaactgaggataaatgttgcctgaagaccgtgtgatgattgtgttaactgcacaaattgtttaaacaatatgaaatctgggcaccttgattaaagaacagaataacagcgatgttcagggaacaaaggagataaccattaggtctggctgcctgagagccgggtggaacagagccatatttctcttctttaaaaaaaaataggagaaatatcactgaattctttttcttagcaaggaagagccctgagtgagagaatgcatcccttggggtaggcttctgaaatggcagctctgggaacatctatcttttttggttgtagataagggatgaaataagccccagtctcctgtagtgctcccaggcttattaggatgaggaaattcccgcctaataaattttggccagtccgtttttctgtcctcaaaccctgtctcctgataagatgttatgaatgacaatgcttgcctgaaacttcattagcactttaaattttgccccagtcctgtgatcttgccctgcctccatttgccttggatattttattaccttgtgaagcatgtgatctctgtaacccacaccctattcgtacactccctccccttttcaaaatcactaataaaaactctctggttttatggctcagggggcatcatggaacctgcttacatgtggtgtctcccttggacaactagctttaaaaatttctctctttgtactctttccctttatttctcagactggccaaacttagggaaaatagaaaagaacccatgaagaattgcctggggtagtttcccccaatatctggcatgccaaaacggttttttctttttcccaagtgcatgtggcaacccgattccctttggcaggtgtgcagaaacttcattggtttggtccacaaaaacccacgttcgactccctgacaactcatgagtagtctgtatatggtccgggttaactatgggtcacagggagtataaaaattatacttatctcttccatattaaactccagttaaaacagaaaagggtttaagaccctgtggaaaatatggtcactctattcagggcagtggtaaactactgtccttggcctcctaaaaatagaaccttagttgtagatctactaaaacagggaagggtctgagtaaccatggaaaatgtggtcactctattcagggcggtggaaaaatactgtccttggtttcctgaaaaaggaaccgtatatgtaaaagtatgggatcatgctggtgcaacattctgggaactggtcccaacagagaattatgttcccatcactgtttgggggtgattgggtcttggtaagtggcgtcctcatacctgggaatcctccctgtcaatacatttaattaatgaagtgttacagcgaattctgaaaagatctaagagatttgttttcactttaattgctgtgatcatgtgcctaattacagtcactgcactggccaccactgctggaatggtgttatataaatctattcaaatggctcattttgctaatgattgggaagcctattccacccaaatgtggaattctcaacaaatcattgatcaaaaattggctaatcaaattaatgatttaagacagtgttatttggcttggagatggggtagtgagtctcgaacattgcatgcaaatgcagtgtgactggaatacttcggatttctatatcacaccataatcctgtaaagagaatgatcattcatgggaaatggtcaaaggacaccttctgggtgatgaagataatttatcattggacataactaaattaaaaacaactttttgaggcctctgaatctcacttatccattgtgcctggagctgaggcattagaccaggtagtagaaaatctttatggactaacccacgacttggattaagtctactgggggctccactgtagtaaattttggaatcatgtttctctgtttaattggcttgtcttaatatgatagaccagtcaaagaatcatgcatcaaaatcgagagaatgaacaaaccttcatcgccatggcacatttatatcatcagaaagggagatatgttgtgggaagtcagggaccctgaatggagggaccagctgaagccatggcagaagaacataaattgtgaagatttcatggacctttattagttccccaaattaatacttttataatttcttacacctgtctttactgccatctctgaacataaattgtgaagatttcatggacatttatcactatgaatgtcgcctcaggaccctgcaatgattgcatgaactgcacaaattgtttaaacaatatggaatctgggaaccttgaaaaaagaacaggacaacagtgatgatcagggaacaagggagataatcattaggtctggtttcctgagagttgggcagaacagagccatatttatcttctttcaaaagcaaataagagaaatatcactgaattctttttctccacaaagaacagccctgagaaagagaatgtattcctaagggtagaactctgaaatggccactctgggaacatctgtcttttatggttgtagagaagggaagaaataagccccagtctcctgtagccctcccaggcttattaggaggaggaaattcccacctaataaattttggtcagaccggttgtctgctctgaaacactgtctcctcataagttgttatcaatgacaatgtgtgcctgaaaattcattagcaattataattttgccccagtcctgtgatctcaccctgcctccagttgccttgtgatattttattactttgtgaagcatgtgatctctgtgacccataccctattaatacacaccttccccttttgaaaatcactaataaaaacttcctggttttattgctcatgcggcatgacagaacctgcctagatgtgatgtctcccctggacacccagctttaaaagtttctctctttgtactctttccctttatttctcagaccagccaacatgtagggaaagtagaaaagaactcacattaaaatatcaggggctgaatttcccctgatagagagattcaaacatgctgtatcaaaataaaaatataactctgtaagattaacacacatatcacaaagcagtttcaaagacagtttattctagtttttatctggggatattctttttttcaccatagacctctatgggttccgaaacctcccttcacagattctaccaaaagagtgtttcaaacctgctgaataaaagaaaaggtttagctctgtgagatgaatccacacatcacaaaacagtttgacagataatttctttgtagattttatctggggatattctgtttttcaccataggcctgtatgggttccccaaagtcccttcacagattctacctaagagtgtttcaaacctgttttatcaaaataaaaatttaattgtgtgagataaatccacacatcacaaagctgttttacagatagaattttctagtttttatctggggatagttggattttcaccataggcctctatggactcccaaagtttctttgcagattctacaaaaaggctgtacgcaacttgctgattcaatagatgggtttatctctgtgagatgaaccaacagatcatggggctgtttcacagatagcttctttctagctggtatctgtgaacattcggttttttatcataggcctcaaaaagcttccaaatttctctttacagattatatgataccagtggtttccaacatgttgtatcaaaagaaacgtttacctctgtgagatgaatccacacatcataaagaagttcacagatagctttttcctagtttttatcaggggataatggtttttttttgtttttttgttttttttgttgttgttatttttttgtttttttttaacataggcctcaaagggcttcaaaatgccccatgaagattctacaaaactagtgtttccaacctactgaatcaaaggaatggtttatctctgtagatgaatccacactcaaaaaagcagtttcacaaatagcttctttctggtttgtatctgggggtattcagtttttcactacattcctgaaagggttcccaaatgtaccttcgcagattccataaaaagtgtctttgtaacctggtgaatcaaaagaaaggtttaagtttgtgatttgaattgagacatcacagagcagttgcacagatagcttctttctagtttttgtctggggatattttgtttttaccatacgagtctaagggctctgatacagccctttaaagattctaccataagagtttttcccatttactgaatcaaaagaaatgtttaactctgtgaaacaaatccacacatcacaaggcagcttcacaggtagcttctttctagtttttatatagaaatattaggtttttcaccttaaaccctaaagggctttgaaatgtcccttcgcagaacttaccaaaagacggtttcacacctgctgaatcaaaacaaatgtttaattctgcgaggtgaatccacacatcacacagcagtttcacagacaccctctttccatattatatctggggatattctgtttttcaccatagaactgtatggtctcccaaatgtcccttcgcgtattctatctgaagagtgtttcaaatttgctggatcaaaagaaaggtttaactctcagtggtgaatccagatatcagaaaggagtttcaccagtagctttcttctgatttttaatgggggatattgtttttttcaccataggcctcaatgggcttccaaatgtcccttctcaggttctaaaaaataagtgtttccaacccgctgaatcaaaggtaaagcttatctctgtgagttgaatccacacatcacaaagtagtttcacagattgctactttgtagtttttgtctgtgaatattttgtttttcaccgtagacctcaaaaagcttccaaagacaaaaacgcccttcacagattctgccaaaaaagtttttccaacctgctgaaacaaaagaaaggtttaactctgagagatgaatccacacatcgcagagcagtttcacagatagcctctttctaatttttatctgggaatattctgtttttcaccataggtctcaatgggctcccacatatccctttcctgattttaccaatagagtgtttccaaactgctgaatcaacagagaactttaactctgtgagaagaatccacacatcacaaagtagcttcactaaaagcttctctgtagcttttatctttgaatattccatttttcaaagtgtgctacaatgggctcacaaatgtcccttaacagatctagcaaaagagtgtttgcaacctgctgaatcaaaagaaaggtttaacctttgagctgaatccacacttaacaaagcagtttcacagatagcttcttgatagtttttatgtggggatattctgttttacaccataggcctctatgggcttataagtgttccttctcagattctttctaaagactgtttccatcctgctgtatcagaagaaagtttaactctgtgcaatgaatctacacatcacagagcacttcacaaatagattctttctagtttttatctggggatattttgtttttcacaataggcctcaagggacgccaaaataccccctcacagtttccaaaaactgagtgtttcaaacctgtggaatcaaaggaaaagtttaaagtctttgaggtgaatccacacatcacaaagcattttcaaggatagcttctttctagtttttatctggggatattcgatttttcaccataggctttaatgggctcccaaatgtcagtatacaaattataaggcaaaagtatttgtaacctgctgagtcaaaataaaggtttaaatctgtgagatgaatccacacattacaaagcagttactcggatagcttttttctagcttttatctggagatattcagtttttcaccttaggcctctatgggctcccaaatgtgtttccacaaattctaccaaaagactgtttccaagctactgaatcaaaagaaatgtttaactctgtgagatgaacccacacataaaagcagttttagagacagagtctttctaggctttatcttgggatatttggttattcaccagagtccaaaaaaactgttattctaccaaaagaatacttccaacctgctgaatcaaaagataggtttaactcagtgagatgaatccacacatcacagagcagtacaacagatagattccttcaagtttttatctggggatattgggtttttcaccttaggtctctatgggcttccaaatgtctctctgcaggttctataagacgtgtttccaacttgctgaatcataagaaatatttaactctgtgagatgaatcctcaatcacatagcagtttcactgataccttcttcctagtatttatatgaagatatttggtttttaaacttaggcctctatgggctgccatatttccctttgcagattcttccaaaaaagtgtttcaaatctgctgtatcaaaagaaaggtttaactctgtgagatgaatccacatatcacaaaatagtttcactgatactttctctctggtttttatgtgtggatattctgtttttcaccatatgcctctgagggctcacaaacatcctttagcagaatctccaaatagagggtttccaaactactgaatgaaaagaaaggattaactctttgaggtgaatctcaaattacaaagcagtttcactgataggttctttctagttcttttctgggaatattttatttttcaccttagtcctcaaagtgctcccaaatttaccttcacagattttacctaaagagagtgtttcaggaagtcagggaccccaatcagagggacgagctgaagccatggcagaagaacataaattgtgaagatttcatggacatttattagttccccaaattaatacatttatttcttacacctgtctttactgcaatctgtgaatataaattgtgaagatttcatggatatttatcacttcccctatcaatacccttgtgatttcctttgcatgtctttaatctcttaatcccatcagcttcttaagctgaggatgaatgtcatctcgggaccgcgtgatgattgcattaactgcaaaaattgtttaaacaatatgaaatctgggcaccttgaagaaagaacaggatagcagtgatgttcagggaacaagggagacaaacattaggtctggctgcctgagagccgggtggaacggagccgtatttctcttctttgaaaagcgtataggagaaatatggctgaattctttttctcagcaaggaacagccctgagaaagagaatgcattcctagggttatgcatctgaaatggcttccctgggaacatctgtcttttactgttgtagataagggatgaaataagccccagtttcccatagtgctcccaggcttattagaatgaggaaattcccacctaatatattttggtcagaccggttgtctgttctcaaatcctgtctcatgataagatgttatcaatgacaaagcatgcccgaaacttcattagcaattttaatttcgccctggtcctttgatctcaccctgcctccctttgccctttgatattttattacattgtgaagcatgtgatctctgtgacccgcatcctgctcgtacaccccctctccttttgaaaatcactaatgctggttttatggctcagggggcatcacggaacctgccaacatgtgatgtcacccctggacacccagctttaaaaatttttgtctttgtaattttctgttaatttcttagaccagtcaacacttaggtaaaatagaataggactcatgttgaaatatcgggggctgaatttcccctaacagagagtttcaaacctattgtatcaaaataaaaatttatctctgtaagatgaatgcacacatcacaaagcagtttcaaagacagcttttatctagtttttaactagggatattcggtttttaaccataggactcaaaattctcccaaatgttccctcatacattctaaccaaagagtgtttccaacttgctgagtgaaaagaaagattcaacactctgagatgaagcgacatatcaaaaagcagtttaacagatagtctcttcctagtttttatctgcagatatttggtttctcaccaaaggactcaaaggactttcaaaagtcccttcgcagactctgcaaaagtactgtttgcaacatgctgaatgtaaacaaaggtttacctctctgggatgaatccacacatcaaaaagaagtttcacagatagaccctttctagttttgatcttgggatatttggtttgtcaccataaactacagtgggctcaaaaaagtcccttcacagattctagaaaaaaagtgtttctaacctagtgaatcaaaaacaagtttaaccctttgagatgaatccacatatcactaagctgtttcacagagagcttatttttagtttttatctgggggtattctgtatttcaccataggcctttggggttcccaaacctccctttacagattctaccaaaagagtgtttcaaacctgcttaataaaagaaaagttttaactctgtgagttgaatccacatgtcacaaaaaagtttgacagatagcttctttctagattttatctggggatattctgtttttcaccataggcctctatgggttcccaaatgtcccttcacagattctacctaaagagtgtttcaaacctgctttagcaaaagaaaaatttaactctgtgagacaaatccacacatcacaaagctgatttacagatagctttttcctagtttttatctgaggatattttatttttcaccataggcccctgtgggctcccaaatgtccctttgcagatactaacaaatagtgtttccaagctgttaaatgaaaacaaatgtttcccactgtgagatgaatccacacgtcagaaagcagtttcacagatagcttttttctagtgtttatctgggaatatttggttttccaccacaggcctctgtggactcccaaaatatcttcacagattccacaaaaagagtgtacaaaacttgctgattcaatagagtggttaatctctgtgagatgaatccacagattatagggctgtttcacagaaagcttttttctagtttttatctgtgaacatttgtctcaaaaagcttcaaaatttctctttgcagtttctatgaaaacagtgtttccaacatgctgtatcaaaagaaacgttgacctctatgagatgaatccactcatcaaaaagaagttcacagatagcttcttcctagtttttatctggggatattgagtgctttttttttaaacataggcctatacaaggctatagtaaccaaacagcatggtactggttccaaaacagagatatagaccaatacaacagaacagagacctcagagataataccactcacacacaaccatctgatctttcaaaaaactgacaaaaacaagaaatggggaaaggattccctatttaataaatggtgctgggaaaactggctgaccatagatagaaagctgaaactggatcccttccttacactttttaaaaaattaattcaagatggattaaagacttaattgttagacctaaaaccaaaaaatccctagaagaaaacctaggcaatacaattcacgacataagcatgggcaaggacttcatgtctaaaacaccaaaccaatggcaacaaaagccaaaattgacaaatgggacctaattaaactaaagagcttctacagagcaaaagaaactaccatcagagtgaacaggcaacctacagaatgggagaaaatttttgcaatctactcatctgacaaagggctaatatccagaatctacaaagaactcaaacaaatttacaagaaaaaaacaaccccaccaaaaagtgggcaaaggatatgagcagacacttctcaaaagaagacttttatgcagccaaaagacacatgaaaaaatgttcatcatcacgggccatcagagaaatgcaaatcaaaaccacagtgagataccatctcacatcagttagaatggcgatcattaaaaaatcaggaaacaacaggtgctggagaggatgtggagaaataggaacacttttacactgttagtgggactctaaattagttcaaccattgtggaagacatcatggaaattcctcaatgatctagaatgaaaaataccatttgacccagccatcccattcctgggtatatacccaaaggattataaatcatgctgctataaagacacacacacacgtatgcttactgtggcactattcacaatagcaaggacttggactcaacccaaatatccatcaatgatagactggattaagacatatacaccattgaacagtatgcagccataaaaaatgatgagttcgtgtcctttgtaaagacatggatgaagctggaaaccatcattctcagcaaactatcacaaggataaaaaagcaaacaccgcattttttcactcataggtgggaattgagcaataagaacacatgcacacaggaaggagaacatcacacaccggggcctgttgtgaggttagggtatggaggagggttagcattaggagatatacctaatgctaaatgactatttaatgggtgcagcacacctacatggcacacgtatacatatgtgacaaaacgaaacactgtacacacgtaccccagaaattaaagtataataataaaaaaagagagattcaaacttgctgtatcaaaataaaaatttaacaccgcaagatgaatacagatatcacaaagcagtttctctttcttaaattttattattattatactttaagttttagggtacatgtgcacattgtgcaggttagttacatatgtatacatgtgccatgctggtatgctgcacccattaactcgtcatttagcattaggtatatctcctaatgctatccctcccccctccccccaccccacaacagtccccagagtgtgatgttccccttcctgtgtccaggtgttctcattgttcaattcccacctatgagtgagaacatgtggtgtttggattttgtccttgtgatagtttactgagaatgatgatttccaatttcatcgatgtccctacaaaggacatgaactcatcattttttatggctgcatagtactccatggtgtatatgtgccacattttcttaatccagtctatccttgttggacatttgggttggttccaagtctttgctattgtgaatagtgctgcattaaacatacgtgtgcatgtgtctttatagcagcatgatttatagtcctttgggtatatacccagtaatgggatggctgggtcaaatggtatttctagttctagatccctgaggaattgccacactgacttccacaatggttgaacaagtttacagtcccaccaatctccagcacctgttgttccctgactttttaatgattgccattctaacaggtgtcagatggcatctcatggtggttttgatttgcatttctctgatggccagtgatggtgagcattttttcatgtgctttttggctgcataaatgtcttctcttgagaagtctctcttcatatacttcgtccactttttgatggggttgtttatttttttcttgtaaatttgtttgggtacattgtagattctggatattagccctttgtcagatgagtagcttgcaaaaattttctcccattttgtaggttgcctgttgactctgatggtagtttcttttgctgtgcagaagctctttagtttaattagatcccatttgtcaattttggctttggttgccatagcttttggtgttttagacatgaagtccttgtccatgcctatgtcctgaatggtaatgcctaggttttcttcaagggtttttatggttttagttctaacttttaagcctttactccatcttgaattaatttttgtataaggtgtaaggaagggatccagtttcagctttctacatgtggctagccagttttcccagaaccatttactaaatagggaatcctttccccatttcttgtttttctcaggtttgtcaaagatcagatagttgtagatatgcggcgttatttctgagggctctgttctgttccattgatctatatctctgtttttgtgccagtaccatgctgttttggttactgtagccttgtagtatagtttgaagtcagatagtgtgactatttccttcaattcttctctgattttagttatttcttgccttctgctagcttttgaatgtgtttgctcttgcttttctagttcttttaattgtgatgttagggtgtcaattttggatctttcctgctttctcttgtgggcttttagtgctataaatttccctctacacactgctttgaatgtgtcccagagattctggtgtgttgtgtctttgttctcgttggtttcaaagaacatctttatttctgccttcatttcgttatgtacccagtagtcattcaggagcaggttgttccgtttccttgtagttgagtggttttgagtgaattccttaatcctgaattctagtttgattgcactgtggtctgagagagagtttgttataatttctgttctttgacatttgctgaggagagctttacttccaactatgtggtcaattttggaataggtgtggtgtggtgctgataaaaatgtatattctgttgatttggggtggagagttttgtagatttctattaggtctgcttggtgcagagctgagttcaattcctgggtatccttgttgactttctgtctcgttgatctgtctaatgttcacagtggggtgttaaagtctcccattattattgtgtgggagtctaagtctctttgtaggtcactcaggacttgctttatgaatctgggtgctcctgtattggcttcatatatatttagaatagttagctcttctttttgaattgatccctttaccattatgtaatggccttctttgtctcttttgatctttgttggtttaaagtctgttttatccaagactaggattgcaacctctgcctttttttgttttctatttgcttggtagatcttcctccatccttttattttgagcctatgtgtgtctctgcacatgagattggtttcctgaatacagcacactgatggatcctgactctttatccaatttgccagtctgtgtcttttaattggagcatttagtccatttacatttaaagttaatattgttatgtgtgaatttgatcctgtcattatgatgttagctggttattttgctcgttaattgatgcagtttctttctagctttgatggtctttacaatttggcatgattttgcagtggttggtaccagttgttcctttccacgtttaatgtttccttcaggagctcttttagggcaggcctcgtggtgacaaaatctctcagcattagcttgtctgtaaagtattttatttctccttcacttatgaatcttaatttggctggatatgaaattctgggttgaaaattcttttctttaagaatgttgaatattggcccccactctcttctggcttgtagagttgctgctgagagatccgctgttagtctgatgggcttccctttgagggtaacccgacctttctctctggctgcccttaacattttttccttcatttcaactttggtgaatctgacaattatgtgtcttggagttgctcttcccgaggagtatctttttggcgttctctgtatttcctgaatctgaatgttggcctgccttgctagattggggaagttgtcctggataatgtcctgcagagtgttttccaacttggttccattctccccatcactttcaggtacaccaatctgacgtagatttggtcatttcacatagtcccatatttcttggaggctttgttcatttctttttactctaaacttcccttcatgcttcatttcattcatttcatcttccatcactgataacctttcttccagttgatcccatcagctcctgaggcttcggcattcttcacatagttctcaagtctttgctttcagctccatcagctcctttaagcacttctctgtattggttattctagttatacattcgtctaaatttttttcaaagtttttaacttttttgcctttggtttgaacatcctcctgtagctcagattagtttgatcatctgaagccttcttctctcaactcgtctaagtaattctccatccagctttgttgcgttgctcgtgaggagctgcgttcctttggaggaggagatgccctctgctttttagagtttccagtttttctgctctgttttttccccatctttgtggttttatgtacttttggtctttgaggatggtgatgtacagatagtttttggtgtggatatcctttctgtttgttagttttctttctaacagacaggaccctcagctgcaggtctgttggagtttgctagaggtccactccagaccctgtttgcctgggtatcaagagcgttggctgcagagcagctgatttttgtgcaccacaaatattgctgtctgatcgttcctctggaagttttgtctcagaggagtacctggccgtgtgatgtgtcagtctgcccttactggggggtgcctcccagttaggctgctcaggggttcggggtcagggacccacttgaggaggcactctgcctgttttcagatctccagcttcatgctgggagaaacactgctgtcttcaaatctgtcagacaggaacatttaagtctggagaggttactgttctttatttttgtctgtgccctgcccccagaggtggagcctacagaggcaggcaggcctctttgggctgtggtgggctccatcaagttggagcttcccggctgctttgtttacctaaggaagcctgggcaatggcgggtgcccctcccccagccttgctgccaccttgtagtttgatctcagactgttgtgctagcaatcagtgagacttcgtgggcataggaccctccaagaaggtgtgggatgttttctcctggtgtgccgttttttaagcccattggaaaagtgcagtattagggtgggagtgacccgattttccaggtgctgtctgtcacccctttctttgactaggaaagggtactccctgaccccttgaatttcctgagtgaggcaatgcctcgccctgcttcgccttgcacatgctgtgctgcaccaactgtcctgtgcccactgtctcgcactccctagtgagatgaacccggtatcccagatggaaatgcagaaatcacctctcttctgtgtcactcacactgggagctgtagactggggctgttcctatttgtccatcttggctgcccacaaaccagtttcaaagacagctttttttctagtttttttctggggacatttgttttttcaccataagcctcaaaatctcccaaatattcctcatacattctaaccaaaaagtgtttccaacttattgagtaaaaagaatggttcatcattgtatctcatggagttaaacctttcttttgattgaacaatttggaaacactttttttttgcagactctgcaaatggataattgggagtgtattgaggcctatggtggaaaaggaaatgtcttcagataaaaactagaaagaagctttctgagatactgctttgtgatgtgtgtattcatctcacagagataaatcttcgttttgattgagtagtttggaaacactgtttttctaggatctgagaaaggatacttggaaagaaatgaggcctttagtgaaaaaggaaatatcttgagacaaaaactagaaagaagctttctgattaactgctttgtgatgtgtacgtgcatctcacaaagttaaacctttcttttgatagagtatcttggatacactgtttttgtagaatctacataggaatatttgggagcacattgaatccccttttgaaaaaggaaatatcttcacataaaaattagacagaagcttttctgagaaaatgctttgtgatgtctgcttttatgtcacagaatttaatcattctttagattaagcagttttgaaacacggtttttttagaatctgtgaaaggatatttgggagcacatggggcccatggtgaaaaagtaatattctcagataaaaagcagaaagatgctttctgagaaactgtttagtaatgtctgcattcatcttatagagttaaacttttcttttgattgagcaggttggaaactatgtttttggagaatctgccaatggatatatgagcgcacattgagttttatggtgaaaaaggaaatatcttaagataaaaattagaaagaacctttctgagacactgctttgtgttgtgttcattcatctcacacagttaaaactttattttgattaagcagtttggaaaaactgtatttgtagaatgtgcaaagggatatttgggaattcattgaggcctaaggtgaaaaaggaaatatcctcagaaaaaaactagaaagattaaggagaaactgctttgtgttgtgtgcattcatctcatagagttaaacctttcttttgattgagcagtttggaaatactgtttttgtagaatcagggaaggaatatatgggagcacattgaggcctacagtgaataaggaaatattctcaggcaaaaactagaaagaagatttctgattaactgttttgtgatgtgtccattcatgtcatacagttaaacctatcttttgattgaacatcttggaaacactatttttgtagattctgtgaagggatatttgggagcactttgaggtctatggtgaaaaaggaattgccttcacataaaaactagaaagaagctttatgagaaacggctttgtgatgtctgcattcatctcacagagttaaatatttcttttgattgagcagtttggaaacactgtttttgtggaatctgtgaagggatattttgtagcatgttggtgcctattcagagaaaagaagtacctcagataaaaatcagaaagatgctttctgaggaactgctttgcaatgtgtacgttcatctcacagagtcatacctttcttttatttgagaagtttggaaacactatttttgtagactctgtgaagggatatttgggagcgctttgaggcctatggtgaaaaaggtgatatcttcacattaaaacaagaaagacacattctgagaacgtgctttgtgatgtgtgcattcctcacacagatataaagctttcttttgattgagcagtttggaaacactgttttggtagaatcttagaaaggatacttgtgaatgcaatgaagtctatggtgaaaaaataaatatcctgagataaaaactagaaagaatctttcttattaactgctttgtgattagtccattcatcacacagagataaacctttcttttgattgtgcatcatagaaacactgttttgtagaatctgtgaagggatatttgggagcacctgaggcctgtggtgaaaaaggaaatatctccacataaaaactagtaagaagctttctgagaaactgctttgtgatatatgtactcatctcacagagttaaaactttccttttagtgagcagtttggaagcactgtttttgtagaatctgtcaagggatatatgggaatgcattgattcctatggcgaaaaatcaaatatcttcacataaaaactaggaagaaactttcagagaaactgctttgtaatgtcagttccgtctcacagaggttaagcattcttttgattgagcaattttcaaagacagttttagtggaatctgtgaaaagatacttgggagcgcattgaagctcatggtgaaaaaggataaatcctcagaaaaaactagaaagaatctttctgattaactgatttgtgatgagtccattcatcacacagagttaaaccattcttttgattgcacagcttggaaacactgttttgttgaatctttgaagggatatttgggagcacaagaggccaatagtgaaaaagataatatcttcaaataaaaacagaaagatgctttctgagaaactgctttgtgacatgggcattcatctcatagagttaaagatttcttttgattgagcagtttggaaacactgtttttgcaggatatgccagtggatatatgggagcactttgaggcctatggtgaaaaagaaaatatattttgaagaaaactagaaagaagttttctgagaatctgtgtggtgatgtgtgcattcatctcacagagttaaaactttcttttgattgagtggtttggtaacaacatttttgtagaatctgtgaagggatatttgggaacaccttaagaactatggtagaaaatgaaatatcatcagataaaatctagaaagaagcttttttagacactgctttgtgatgtgtgcattaatctcagagttaatcctttcttctccttgagaagtttggaaagactgttttgtagaatctgtgagggatatttgggagcgccttgaggactatggtgaaaaaggaaatatcttcagataaatctagaaagaagctttgtaggaaactgctttgtgatgggtgcattcatctcatagagttaaacctttcttctgatcaagcagtttggaaaaactgtttttgtagaatctgcaaaggaatatttaggaaagcattgaggcctatggtgaaaagggaaatatcttcatatataccagaaagaacgtttctgagaaactgctttgtgatgtgtgcatacatctcacagagttaaactactcttttgactgagcagtttggaaacactgtttttggagaatctgtgaagagatatttgggagtgccttaaggactatggtggaaaagtaaatatcatcagataaaaactagaaagaagttttttgagacactgctttgtgatgtgtgcatttatctcacagagttaatcctttcttttcattgagcagtttggaaagattgtttttgtagaatctgtgagggatagtcgggagcacattgaggcctatggtgaaaaaggaaatatcttcagataaatctagaaagaagctttgtgagaaactgctttgtgatgggtgacttcatctcacagagttaaacctttcttctgattgagcagtttggaaaaaatgtttttgtagattctgcaaagggatatttgggaacacattgaggcctgtggtgaaaagggaaatttcttcaggtaaataccaggaagaagctttctcagaaactgctctgtgatgtgtgcattcatctcacagagttaaacatttcttctgattgagcaatttggaaacactgtttttatagaatctctgaaaggatattttggaatgcattgaagcctatggtgaaaaagaaaatatcttcagataaaactaggaagatttctgagaaacacctttggaacgtgtgctttcatctctcagagttaatcttttcttttgattgagcagtttggaatgtctatttttctagaatccatgaagggattattgggagcgcattggggccaactgtgaaaaaggaaatatctttagataaaaactagaaagcagctttctgaaaaacttctttgtgaaatctgcatttggctcacaccattttgcattcttttgattaagcagtttgcaaacagtttttgtagaatctttgaaaggatatttgggagtgcattgaggcctatggtgaaaactgaaatatcttcatataaaaaccagaaagatgcattatgagaaactgctttgtgatgtgtccattcatctcacagaaataaacttttattttgattgagcagtttggaaacactgtttttttcttcaatctgccaagtgatacatgagagcacattgaggcctatggtgaaagaggaaatatcttcagagaaaagctagaaggaagctttctgaaatactgttttgtgatgtctgcattcatctcagagagccaaacacttcttttgatttactcatttggaaacactgattttttagaatctacgaagggatatttgggagcacattgaggactatggtgaaaaagcaaatatcttcagagaaaaactagaagcaagctttctgaaacactgctttgtggtgtctgtattcatgtcagagacttaaacttttcttttgattgacctgtttggaaccactgatttttcagaatctgtgaagggatatttgggagctcattgaggactatggtgaaaaagaaaatatcttctgacaagaactagaaagaagctctctgagaaactgcatagtgatgtgtgcattcatctcacaaagttaaatgtttctttgatttagctgtttggtaacaacacttttgtagaatctgtgaagggatatttgggagtgcattgaggcctatggtgagaaggaaatatcttcagataaatactaatagaagctttctgagaaagtgctttgtgatgtgtacattcatctcacagagttaaagttttgttttgatagacctgtttgtaaacactgatggtgtagaatctgtgaagggatatttgggagagcattgaaggctatggtgaaaaaggaaatatcttcagaaaaaaactagaaagtagctttctgagaaactgatttgtgatgtgcccattcatctcacagagttaaaactttcttttgattgagcagcttggaaacactgtttttgtagaatctgcgaagggatatttaggagcacattgaggcctatgatggaaagggaatcatcttcgcttaaaaattacaaagaatctttctgagaaaattctttgtgttgtgtgcattcgtctctcagagctaaacatttctgttcattgagagttttggagatactgttttcgtggaatctgagattgcatatttcggagcacattgtggcctatagtgaagaaggaaatatcttcccataaaaaccagaaagaagctttctcagaaactgctttgtgatgtgtacattcatctcacagagttaaagttttcttttgattgaccagtttggaaacgctgttattgcggaatctgcaaaggcatatttgggagcgcctagaggcctatgttggaaaatgaaatatcttcagataaaaactagaaagaagctttcagagacactgctttctgacgtatgcattcatctcacagagcacaacctttcttttgattgatcagtttggtaacaatgtttttgtagaaatcatgaagggatatttaggtgtgcattgcatcctatgctgaaaaaggaaatatcttcagataaatactagaaagaagttttctgagaaactgctttctgatgtttgcattcacctcacaaagttaaaactttcttttgattgggcagtttggaaacactgtttttgtagaatctgtgaagggatattttggaatgcattgaagtatgtggtgaaatagggaatatcctcaggtaaaaactagagaggtttctgagaaacaactttgtgatgtgtgctttcatctcacagagttaatcatttcttttgactgagcagttaggaaactgtgtttttctagaatctgtgaagggatatttgggatcacatttaggcccatggtgaacaattaaatatctttagataaaatctagaaagaagctttctgagacactgctttgtgatgtgtgtattcatctctcagaggtaaacctttcggctgattgagcagattggaaagactgtttttgtgaaaactgcgatgggatatttgggagcgcattgaggcctatggtgaaaaaggaaatatctgcagatgaaaactagacagaagctttctgagaaactgctttgtgacgtgtgcattcatctcacacaattaaaattttctttgactgatcagtttggaaacactgattttgtggaatctgcaaagtgatatttggaagtgcattgatgcctatggtgaaaaagaaaatatcttcaggtaaaaactagaaagaagctttctgagacactgttttgtgatgtgtgcattcatcttacagagataaagctttctgttgattgagcagtttggaaacactgtttctctagaatttgcagaagggtacttgggaatgcaatgagtctgctggtgaaaaaggaaatctcctcagacaaaaactagaaagaagctttctgattaactgctttctgatgtgttcactcatctcacagagttaaacttttcatttgattgagcatcttggaaacattgtttttgtagaatctgcaaagggatatttgtgagcacattaaggcctttggtgaaaaaggaaatatcttcagataaaaaccagtaggaagctttcagagaaactgctttgtgttgtctgcattcatctcacactgtttaagcattattttgattaatctgtttggaaacacagcttttgtagaatctgtgaaaggatatttgggaatacatttgggcctgttgtgaaacagaaatatcctcagataaaaaccagaaagatgttttctgagaaactgctttgtgatgtgtgcattcacctcacagtgttaaacctttctttagattgagcagtttcaaaacactgtttttgtagaatctgttaagggatataagggaatgcattgaagcctaaggtggaaaaggaaatatcttcacataaacactagaaaaaagctttctgatgaactgctttgtgatgtctgcattcgactcacagagtttaagcattcttttgattaagcagtttggaaacacaatttttgtagagtctgtgaaagcatacttggtagccgtttggggtctatggtgagaaaggatatatcctgagataaaatccagaaagactctttctgaagaactgctttgtgatgtgtgctttcttctcacagggttacacctttcttttgattgagaagtttggaaacactgtttctgtagattctgtgaagggatattttggagcacactgaggtctatggtgaaaaaggaaataacttcagataaagatcagaaagaagctttcagagaaactgctttgtgatgtgtgcattcatctcacagagttaagccattcttttgattgagcagtttggaaacactgtttttgtagaatctgcaaagggatatttgggagcacattgaggcctatggtgaaaaataaaatatcttctgttgaaaactagaaagaatctttctgagaaactgctttgtaatgtgtgcactcttctcgcatagttaaacctttcttctaattgagtagtttggaaacactgtttttctaaaatcattgaagggatatttgggaacgcattgaggcctatggtgaacaatgtgatatcctcagataaatactggaaagatttctgagaaacagatctgtgatgtgagcttttatcccacagagttaatcctttcttttgattgcaaagtttggaaactgtgtttttctagaatctgtgaagggatatttgggagcacattgaggcttattgttaaaaaggaaatatctttagctaaaaactagaaagaagctttctggaaaactgctttgtgaggtgtgtattcatctaacagagttaaacgtttcctttgattaagaagtttggaaacactgtttttatggaatctgcaaggggatatttggaagtgcattgagacctaaggcaaaaaaggaaataacttcagaagaaaactagacagcagctgtctgagaaactgctttgtgatgtgtgcattcatctcagagagttaatttttcttttgattaatcagtttggaaacactattttgtagaatttgtgaagggatatttgagagtccattgaggcgtatggtgaaaaaggaaatatcttcagataaaaacaagaaagaagctttctgagacagttttgtgatgtgtgcattcgtctcacagagataatgctttcttttgattgagcagtttggaaacaccatttttgtagaatctgtgaatgggtaatttggagtgcaatgaggcctactgtaaaaaggaagtatcctcagacaaaaactagaaagaagttttctgattaacttcgttctgatgtgtaaattcatctcacagagttaaacttttctgttgattgagcatcttggaaacactgcttttgtagaatatatgaagggatatttgtgagtacattgaggccttttgcaaaaatgaaatatcttcacataaaaactagaaagaaactttctgagaaactgcttagttttgtctgcatttgtcttacagagtttaagcattcttttggttaagcagtttggaaacacagtttttgtagaatctgtgaaaggatatttgggtgcacaatagggcctatggtgaaaaagacatattctcagataaaaaccagaaagatggttctgagaaactgctttgtgacgtgtgcattcatctcagagagttgaatgtttcttttgattgagcagtttggaaatgctggttttgtagaatgtgtgaagggatattttggagcacattttggcctatggtgaaaaagaaagtatcttcagataaaaaacagaaagaagctttcaaagaaactgctttgtgatgtgtgcattaatcttacagaattaaactgttcttttgattgagaagtttggagacatgttttttgtagaatctgcgaagggatacttgggagcacaatgaggccaatggtgaaaaaggaaatatcatctgatgaaaactagaaagattctttctgagaaacagctttgtgatgtgtgcattcatctcacaaagttaaacctttcttttgattgagcagtttgataacaatgtttttgtagaatctgcgaagggatattaggggtgcatagaggcccatggttaaaaagaaaatattttctgatgaaaactagaaagaaactttctgagaaactgctttgtgatgtgtgcattcacctcacagagttaaagctttattttgattgatcagtttggaaacaatgattttgtagaatctgtgaaggcatattttggagcacatcgaggcttatggtgaaaaagaaaatatcttcagatgaaaaatagaaagaagctttatgagaaactgctttgtgatgtgtgcattcgtatcacagagataatgctttcttttcatggatccgtttggaaacactgtttttctagaatctgcaaaagggtacctgggaacacaatgaggcctatggtgaaaaaggaaataccttcagacaaaaactagaaagaagctttctgaaaaactgctttgtgaagtgtgcattcgtctcttagagttaaagttgtcttttgattgataagtttggagacacggttttggtagagtctgtgaagggatatttgggagcaccttgaggcctatgttggaaaaggaattatcttcaaatagaaactagaaagaaggtttttgagacactgtgatgtgtgctttcatctcacagtgttaaacctttcttttgattgagcactttgggaagactgtttttggaggatctgcagaaggatatttgggcgtgcattgagggctatatggtgaaaatggaaatatctacagataaatctagaaaaaagcattgtgagaaactgtttgtgatatgtgtattcatctcacagagataaagctttcctttgattgagcagtttggaaacacggtttttgttgaatctgcaatgggatgtttgggagctccttgaggcctatggcagtaaaggaaatatcttcagataaaaactagaagaaagctttttgagacactgctttgtgatttgtgcactcgtctcacataattaaacctttcttttcattcagcagtttaggaacactgtatttttagaatcagcaaatagatatttgggagtgcattgaggcccaaatacactatggcaaaaaaaaagtgcattgagcactttgggaagactgtttttacagaatctgcaaaaggatattcgggagtgctttgaggcctatatggtgaaaagggaaatatcttcagataaatctagaaaaaaacattgtgagaaactgctttgtgatatgtgtattcatctcacagagataaacctttcctttgattgagcagtgtggaaacatggtttttgttgaatctgcgacgggatgtttgggagctccttgcggcctatggtggaaaaggaaacatcttcagataaaaattagaaggaagctttttaagacactgctttgtgatgtgtgcattcgactcacataattaaacctttcttttcattcagcagtttagaaacactgtatttttagaatctgcaaagagatatttgggagtgcattgaggcataaatccctatggcaaaaaagaaaatatctccagataaaaattagaaagtagtttttgagaatctgctttgtgatgtgtgcattcctctcacagagttaaacctttcttttgattcagctgtttggaaacactcttcttgtaggatctgtgaaaggatatttcagagcgcattgacacttatggtgaaaaataaaagttcttcagataaaaactagaaggaagctttctgagaaactgctttgtgatgtgtgcattcatctcacagagttaaagctttctcttgattcaacagtttggaaaactgtttttgtccattcagcgaatggacatcagacagctctttgactccaatggtgaataagtgaatatcccaggataaaaacaggaaggtagccatctgagaaactgctttgtgaagtgtgcactcttctcacagagttaaaccattcttatcattcagcagtttggaaacactgtttttgtattatgtgcaaagggatatctgggaatgcattgaggcctatggtgaaaaagaaaatatcttcagatgaaagctagaaagtagctttataagaaactactttgggatgtgtgcattcatcttacagcattaaacttttcttttgattcagctgcttggaaacactgtttttgtccattcaacaaaaggatatttgggagatcattgaggtgaatggtggaaaagtgaatatcctagtatagaaactagaaagaagctaccttaggaactgctttttgatgtgtgcactcgtctcccagagttaaacctttcttttcattcagcagtttggcaacactgtttttgtgctttctgagaatggacatctagggactcaatgaagccttggcaaagcagtgaatgtgcaaggataaaaactagaaggctggtatctgagaaaccactttgtgatgtgtgcattcattttgcagtttgaaaccattcttttcattcagaagattcaaaacactgttttccttgaatatgtaaagggatatttaggagtgtttagacgccaatagtgataaagaaaataccttcagagaaaaactaaaaagaagttttctgagaaactgctttgtgatgtgtgtattcacctcagagagttcaacatttcttttgattcagcagtttgcaaacactgtttatgtccattctaggaatggacattttggagatcattgaggccaatggtgagaaagaaaatatcccaggataacagctagaagaaagctatctgagaaagcactttgtgatttttgcattcatctcgcagagttaaacttttcttttcattaagcagtttggaaacactgtttatgtagaatctgtgaagggatactttggagtgcattgagggcaatagtgaaaaagaaaatattttcagataaaaactagaaagaaattttctgagaaacttctttgtgatgtgtgcattcatattgcacagttaaacctttcttttgattcttcagtttggaaacactatttttgtagaatctacaaagggttatttgggagcgccttgaggcctagagtgaataaatatattccaataaaaactaaagtaagatttctgagaaactgctttgtgatgtgtgcatcttgcagagttgaaaagttcgtttcattcaacagtttggaaacactgttttttagaatcttcaaagggatatttgggagtgcgttgaggcctatgatgaaaaataaaatatcttcagataaaaagtagaaagaagctttctgagaaacagttttgtgatgtgtccatacatctcacagggttaaacctttctattgattcagcagtttggaaagactgtttttgtagaatctgtgaagtgatgtatgggagtgcattgaggccaacagagaaaaagaaaatgtcttcagataaaaacaagaaacaagattttgagatactgctttgtgatgtgtgcattcatctcacagagtgaaattttcttttgattcagcagtttggaaacactgtttttgcataatctacaaagggatacttgggagcacattgaggcctatggtgaaaaagaaaatttgctcggataaaaactagaaagatgctttctgagaaactgctgtgtgatatgtgcattcatctcacagagttaaaagtttctattcattcagcagtatggaaacactgtttttgtccattctgtgaatggacatttgggagctcattgaggctgactgtgaaaaagagaatatcccaggataaaaactagaatgaagctatctgagaaacctctttatgatgtgtgcattcatctgatagagttaaactattttttcattcagcagtttgcaaacactatttttgtaggttctgcaaatgggtatttgggagcgtattgtggcctatggtgaaaaagaaaatatcttcagataaaaactagaaggactctttctgaaaaactgctttgtgatgtgtgcgttcatctcacagagttgtacatttcttttcattcagcagtttgtaatgttttttgtccattctaccaatggacatttgggagttcattgatgccaatggcgaaaaagtgaatatcccaggacaaaaaccagaaggaagctatctgagaaactgctttgtgatgtgtgcattcctctcagggaattaaaactttcctttcattgggcagttcggaaatactgtttttggtgaatctgcaaagggatattttagagcacattgaagcctaaggtgaaaaagaaaataccttcagataaaaactagaaagaaactttcggagaaactgctttgtgatgtgtcattcatctcccaaagttaaacctttcttctgattcagcagtttggaaacaatttttgtccattttgcaaatggaaatttggcagcatatttaggtcaatggcaaaaaagcaaatatcccagaataaaaagtagaaggaagctttctgagaaacttctttgtgatatgtgcattcacctcacagagttaaaagtttcttttgattctgaattttggaaacactgtttttgtccattctgtgaatggacatcggggagctctgagaccaatagcaaaaaagcgaatatctcaggataaaaactagaaggaagctgtctgacaaactgctttgtgatgtatgcgtacatcttgcagagataaaccgttcttttcattaagcagtttggaaatactgcttttgtagaatctgtgaagggatattttggagctcattgaggcctaaggcgaaaaatcaaatatccaaagataaaaactagaaggaagatatctgagaaactcctttgttatgtgtgcatttgtctcacagacttaaaactttcttttgattcagcactagaaaaaagctttgtgtttgcagaataaaacttttcattcagcagtttggaaacactgtttttgtagaatctgcaaaggaatatttgtgagtgcattgaggcctatggtgataaagagaatatgtttggatcaaaactagaaagaagctttctgagtaagtgctttgtgatatgtgcattcatcttgcagagtgaaacctttttattttggcagtttggaaacactgtttttgtccattctgcaaatggacatctgggagctcaatggagtcaatggtgaaaaagaatatgccaggataaaaactagaagaaatgtatctgagaaaccactttgtgaggtgtgcattcattttgcagactgaaaccattcttttcattcagcagtttggaaacactgtttttctagaatctgcgaaggaatatttgggagcattttgaggcctacggtgaaaaagaaaatatcttccgataaaaattggaaagaagatttctgagaaactgctttgtgatgtatgcattcatgtcacagagttaaacctttcttttgattcaccagtttggaaacactgtctttgtagaatctgtgaagggatatttgggaacccattgaggcctatggtgaaaaagaaatcttctgataaaaactaaaagaagctttctgagaaactgctttgtgatgtgtgcattcttcttgcagagttaaaccgttcttttcattcagcactttggaaacactgtttttgtagaatctttgaagggatatttgggagcgcattgaggcctatgttgaaaaagtaaatatcttcagataaaaattaaaaagaagctactggagaaacagctttgtgatgtgtccattcatctcacagcattcaactttttttttgaatcagcagtttggaaagactgtttttgtagaatgtgcaaagtgatatatggcctcattgaggccaatagtgaaaaagaaaatatcttcagataaaaacaagaaagaagctttctgaaaaactgctttgtgatgtgtgcattcctctcacggagttaaaactttcttttctttggggaatctggaaatattgtttttttagaatctgccaagggataatttggagcacattgaggccaatagtgaaaaccaaattatcttcagataaaaactagaaagaagttttttgagaaactgctttgttatgtgtacgttcatctcatagagctaaacctttcttttgattcagcagtttggaaacactgttttggtccattcagtgaatggatatttgggagctcttgggccagtaatgaaaaagtgaatatcccaggttaaataactggaaggaagctgtctgagaaactactttgtgatgtgtgcatatatctcacagagataaaccattcttttcattaagcagtttggaaacacagcttttttaggatctgtgaagggatatttgggagctcattgatgccaaaggtgaaaaagcgaatatccaaagataaaaactagaaggaagatatatgagaaaccctttgttaagtatgcattcatctcacagagttaaaactttttttgattcagcattttggaaatactgtttttgtagaatctgtgaagggatatttcggagcgcattgaggcctatggtgaaaaagaaaatatcttcagataaaaactagaaaaaaagctttatgagaaactgctgtgtgatgtgtgcatttatctcactgagttaaaacgttccattgattcagaggtatggaaacactgtttttgtagaatctgcgaagggatatttgggagcgcatgcggcctatggtgaaaaagaaattatcttcacataaaaattagaaggaagatttcaaagaagctgatttgtgtcttgtgcattcatctcagatagttaaatctttcttttattcagcagtttataaacactgtttttgtccattttgtgaatgggcttttgggagcccattgaggccaatggcaaaaaagcaaatatcccaggataaaagctagaaggaagctatctaagaaactgctttatgatgtctgcattcatctcacagagttaaacatttattttcattcagcactttggaaacagtgtttttgtagaatctgcaaagggatatttgggagcatattgaggcctatggtgaaaaaggaaatatcttcagattaaaacgagaaaggaccatcctgaaaaactgcttcatgatgtgtgcattcatttcacagagctaaacttttctttcaattctgcagtttggaatgactctttttctccattctgtgaatggacatttgtgagctcatcgagggcaatagccaaaaagccaatatcccaggataaaaactggaaggaagctatctgggaagcgactttgtcatgtgtgcattcatctcacatcatgaaacctttctttttcatttagcagtttggaaacacggtttttgtagaatctgcgaagtgatatttgggagcacattgaggcctatgttggaaaagaaagtatcttcagataaaaactgaaaagaagctttctgaaaaactgctttgtgatgtgtgcattcatctgacagagtgaaaactttcttctgattcagcagtttggaaacactgtttttatccattctgcgaatggacatttgggagctcatagacaccaatggcgaaaaagtgaatataccaggataaaacctagaaggaagctatctgaaaaactgtcgtgtgatgcgtgaattcatctcacagtgataaaccattctttccattaagcagtttggaaacactgtttttgtagaatctgcaaagggatatttgggagcacactgaggccaatggtgaaaaagaaaatatcttcagataaaaactagaaagaagctttctgagaaactgctttgtgatgtgtgtattcacttcacagagttaaaagtttcttttgaatcagcactttggaaaaactgtttttttccattctgcaaatggacattcaggagctcattgaggtcaatggtgaaagactgaatatcccaggataaaacctaaaaggaagctatctgagaaaccactttgcgatgtgtgcattcatctcacagagttaaatttttcttttgattcagcagtttggaaacactatttttgtccattctgcgagtggacatatgggagctcattgagaccaatggtgattacacaaatgtcccaggataaaaactagaaggaagctctctgagaaacagctttgtgatgtgtgcattcatttcacagagtttaaactttcttttgattcagcagtttggaaatgctgttttcccagaatctgagaagggatattagggagctcattgaggccaaagttgaaaaagaaattagcttcagataaaaactggaactgaaaaactgctttgtgatgtgaacattcatctcacagagttaaatttttcttttaatttagcagtttggaaacattgtttttgcccattctgcgaatggacatctgggagttctttgagaccaatggcgattatgcaattataccaggataaaaactagaaggaagctatctgagaaaccgctttgtgaagtgtgcattcatttcacagagtgaaacctatcttttcattcagcagtttggaaacactgtttttgtagaaatatctaagggatattttgagtgcattgaagcctgtggttaaaaagaaaatatactcagatgaaaactagaaagaaggtttctgagaaactgctttgtgatgtgtgcatttatctcacagagcaaaacttttctttttattcagccgtttggaaacactgtctttgtccattctgcaaatgggcattttggagctcactgaggtcaatggcaaaaaaacaaatatcccacggtaaaaataagaagaaatctatctgagaaaccgctctgtgatgtgtgcattcatctcactaagttaaacctttctgttgattcataagtttggaaacactgtttttccacaatctgcgaagggatatttgggaacatattgagcactatggtgaaaggaaaatatcttcagatacaaactactaagaagctttctgagaaactgctttgtaatgtgttcattcgtctcccatagtcaaaactttcttttgatttgtgagtttggaaacactgtttttgtcctttctgtgaatggatattttagagctcattgaggccaatgacaaaaaagtgcaaatccaaggataagaactacaaggaagctatctgagaaaccgatttgagatgtctgcattcatcttgcagagttaaacatttgttttcatgcagtagtttggaagaactatttttctagaatctgcacagtgatatttgggagcgcattgaggcttagggtggaaaagaaaatatcttcagataaaaattataaagaagctgtctgagaaaatgctttgtgatgtgtgcattcatcttacagagttaaacctttcttttgattcagcaggttggaaaccctatatttgtccattattcgagtggatatttggcatatcattgaggccaatggcaaaaaagcgaatatcccaggataaaagctagaaggaaattatctaagaaaccaccttgttgtgtgtgcattaattgcgcagagttaaagcttccttttcattcagcagtttggaaatgctttttttttgtagaatctgtgaagggatatatgtgagtgcattgaggcctatggtaaaaagaaaatatcatctagataaaaaactagaaagagattttctgagaaactgctaggtgattgtccattcctctcacagattgaaaccttcctcctattgtagcagtttggtaacaccattttagtctattctgcgaggggacattttggagcttatttaggccaatagcaaagaaacgaatatcacaggataaaaactagaaggaagctatctgagaaatggctttttgatgtgtgcatttatctcacagagttatacctttattttgattcagtagtttggaagcactgtttttgtagaatctgcaaagagatatttggtagcacattgacgcctctggtgaaaaagaaaatatcttcggataaaaactagcaagtaactttctgagatactgctttgtgatgtgtacactcatgtcacagagttaaaactttccttggattcagaggtttggaaacaccatttctgtagactctctgaaggtatatttgggagtccactgaggcctaaggtgaataagaaattaacgttgataaaatgtagaaagaatctttctgagaaaccactttctgataggtgcatgcatctcatagggttaaatgtttctttacattgagcagtttgaacacactgtttttggagaatctctaaagggatatttgtgagcgcattgaggcatgtgatgaaaaaaatgccttcagataaaaactagaaagaagctttctgagaaactgcttaatgaggtgtgcattcatctcacagagttaaacgtttcttttgattcagcagtttggaaacactgttttggttcattctgcaaatggacattttggaactctttgaggcctatggggaaaaagcaaatatccttggatagaaactagaaagaagctatctgagaaaccactttgtgatgtgtgcattcatctcacatagttaaacctttcttttcattcagcagtttggaaacactttttttgtacaatctgtgaagggatatttgggagtgtattgaggcctatggtgaaaaagaaaatatcttcagataaaaaggagtaggaatgtttctgagaaactgtttcatgatgtgtgcattcatctcaaaaagttaaacctttcttttgattcagcagtttggaaacactatttttctaaaatctgtgaagggatatttgggagtgcactgaggcctagggtgaaaaagaaaacatcttcagttaaaacctataaagaagctttctgagaaactgctttgggatatgggcattcatctcacagactttaacctttcctttgattcatatttggaaacactgtttttttttttagattatgcaaagggacatttgggagcaatttgaggcctatggtgaaaaagaaaatatcttcaggtaaaaactagaaagaagctttctgagaaactgttttgtgatgtgtgcattcgtgtcccagagttaaaattttcctttgaatcagcagtttggaaacactgttttgtctgttctgtgaatggacacttgggagctcattgaggccaattgagaaaaagtaactatcccagaataaaaactagaaggaagctatttgagacacccctttataatgtgttcattcatcttgcagagttaaaccattcttttcaatcaccagtttggaaaaactgtttttgtacaatctgcaaagggatatttggtagcacattgacgagtatggtgaaaaaaatcttcagataaaaactagaaagaaggtttctgtgaaactgaattgggatgtgtgcattcatgtaacagaggtaaacctttcttttgattcagcagtttggaaacactgtttttgtccattctgtgaatggacatttgaaagctcattgatgaaaacagcaaaaaagccaatatcccagggtgaaaactagaaggaaactgtctgagaaaccactttgtgatgtgtccattcatctcacagagttaaactgatcttttcattcagcaatttggaaacactgtttttgtagaatctgcaaaaggatatttgggagcaaattgaggccagtgttgaaaaagaaaatatctccagttaaaaactagaaagaagatttatgagtaattgctttgtgatgtgtgctttcatctcacagagttcaatctttctttttattcagcagtttgggaacattgcttttctagaatctgtgaagggatatttggtagcgcattgagccttacggttaaaaacaaattatcttcagataaaaacttgaaagaagcttagtaagaaactgctttgtgatgtgtgcattcatctcacagacttaaacatttctattgactcagcactttggaaacactgtttttgtccattctgcgaatggatatttgggagctcattgaggccaaaggcaaaaaagccaatatcccaggattaaaattagaaggaagctgtcttagaaaccgcttggtgatgtgtgcgttcatctctcagagttcaaccattagttgtattcatctgtttggaaacaccgtttccaggatatttcagagcacattgaggcctatagtgaaaaagaaagtatcttaagataaaaactagaaagaagttttctgagaaactactttgggaagtgttcatttatctaacagagttaaacctttcttttgattcggcagtttggaaaccctgtttttaaccactctgtgaatggacttttgggagctcattgaggtcaatggtgaaaaagcgaatatcccagtaaaaaaactagaaggaagctatctgagaaactgctttgtgatatgtgcaattgcctaggggagttaaatctttcttttcattcaccaatttggaaacaacgtttttacagaatcttcaaagggatatttgggagtgcaaggaggcctatggtgaggaaaaaaatatcttcagataaaagtagaaagaagttttctgaaaaactgctttgtgatgtgtgcattcatctcactgagttaaaccattccttggaatcagcagtttgtaaacacaatttttgtacattgtgtgaaagggcattttgtaactgattgaggtctaaggtgaaaaagcaaatatcccgggataaaaactagaaggaagctgttagagaaaccactttgtgatgtgttcattcatctggcagagttaaatctttcttttctttcagtagtttggaaacactgtttttgtagaatctgtgaatggacatttggcagcattttgaggcctatggtgaaaaggaaaataacttcagataaaaaatagaagaacgctttctgagaaactgcattgtgatgtgtgcattcacctcatagattcaaacctgtgttttgattcagcagtttggagacagtatttgtccattctgccaaaggacatatatgagttcatggaggccaaaggcaaaaaagaaaatgtccaagaataaaaccagacataagctatctgagaaaccgctttgtcatctgcacattcatctcatagaggtaaagcattctcttcattaagtaggttggaaacacagtttttgtagaatctgtgaagggctatttggagcttattgatgccaaatgtgaaaaagccaatatcccaggataaaaacaagaaggaagctatctgagaaactgctttgtaatgtgtacatttaactggcagagtgaaaactttcttttaattgaacagtttggaaacgagtttttgtagaatctgccaagggatatttgggaatgcattgaggcttatggtgaaaaggaaaatatcttcagataaaaactagagagaatctttctgagaaactgctttgtgctgtgtgcattcctctcacagagttaagcctatcttttgattcagcagtttggaaacactgtttttgtagaatctgtgaagggatacttgggagggcattgaggcctatggtgcaataaaaatatgttcagataaaaactagaaggaagctttcagagaaattactctgtgatgggtgcattcctctcacagcattaaacttttccttagattcagcagttctgaaagtctgtttttgtccattcttcgaatggacattttggaaatgactgaggccactgatgaaaaagccaacatcccaggataaaaaactagaaggaagctgtctgagaaactgctttgtgatgtgtgcattcatctcacagaggcaaacatttctgttgattcagtagtatgaaaactgtttttgtccattccatgaatggaaatttgggagctcattgaggttaatggtgaaaaaggaatatcccaagataaaaacttgaaggaagctatctgagaaacactttatgatgtgcacattcatcttgcagagttaaacctttcttttgattgagctgtttggaaatactgtttttatagaatctgcaaagagatatttgggagtgcatggaggcttatggtgaaaaaaatctcttcaaatacatctagaaagaagcttttggagaaattgatttgtgatgtgtccattcacgtcacagaggtaaacctttcttttgattcagctgtttggaaacactgtttttatccattctgtgaatggagagttgggagctccttgaagccaatggtgaaaaactgaatatcccagaataaaaactagaaggaagctatttgagaaatggctttgtgatgggagtattcatctcacagagtgaaaccttacttttcattcagcagtttggaaacactgtttctctagaatctgtgaaggtatatttgggagtgcattgaggtctatggtgaaaaataaattatcttaagataaagccagaaagaagctttctgagaatttactttgtgatgtgtgcctttatctcacagagttaaaccttttattcagaagtttggaaacactgttttgtccattcagcaaatggacattttggagttctttgaggccaatggtgaaaaaacgaatatcccaagatgaaaactagaaggaagctatctgaaaaactgctttgtgatgtgtgcaatcatctcacagagtgaaacgttgcttttcattcagcaggttcaaacaatatttttataaaaactagaaagatgtttctgagaaactgcttgacgtgtgctttcatctcacagagttatacctttcttttcattcagcagtttggaaacactgtttcggtttattctgtgaatggacttttgggagtgcattgaggccaatggagataaagggaatatcccaggataaaaactggaggaaactaactgagaaactgttttgtgagatgtgcatccatctcatagaggtaaacgtttgttttcattcagcattttggaaacactgttattttagaatctgtgaagggatatttggtagtgcattgaggcctagggtgaaaaagaaaatatgttgagataaaaacgggaaagaagctttctgaaaaaattctcagtggagtgtgctatcaactcagaatcaaacatttcttttcattcaacagtttggaaacactgctttttttttacaatctgcgaatggacatttgggagctcattgaagccgacagcgaaaaagcgaatattccaggataaaaactagaaggaagatgtctgagaaacagctttgtgaggtgtgcattaatctctcaagttaaactgttctttacattctgcagtttggaaacactgtttttgtagaatctgcaaagggatatttgggagggcattgaggcttatagtgaaaaagaaaataacttcatatgaaatctagaaagaagctttctgagaaactactttgtgaagtgtgtattcatctcacaaagttaaacctttcttttgattcagcagtttggaaaaatgttttgtagcatatgtgaagcgatatttgggagcacattgagtcttatgatgaaaaagaaaatatcttcatgtaaaaactagaaacaatctttctgagaaacttctttgagatgtgtgcattcatctcacagatttaaaactttcttttgactccacagtttggagtcactgttttctagaaactgtgaagggatattagggaatgaattgaggccaatggtgaaaaagtgaatatcccaggttaaaaactagaaggaaactaactgagaaacctcactgtgatgtgtgcattcatctcacagagtgaaatcttaatttttattcagcagtttggaaacactgtttttgtagaatctgcagtgtaatattttggagcacattgaggcctaaggtgaaaaagaaaatatcttcagataagaactagaaagaagcttttggagaaactgatttgtgatgtgtactttcatctaacagagttcaacttttgttttattcagcagtgtggaaaccctgtttttgtccattctgtgaatggacatgtgggagctcacagaggctgacagtgaaaaagggaatatcccaggataaaaactagagggaagttatctgagaaaccactttgtgatgtgtgcattcatctcacagagttaaactttcttttcattctgcattttggaaacaatgtttctgtagaatctgcgaggtgatatttgggaccatattgaggcctatggtgaaaaagaaaatatctccagataaaaactagaaagaaactttctgagaaatttctttgtgatgtgcgcattcatctcaaagaggtaaacctttcttttgtttcagcagtttggaaacactgtttttgtccattctgtgaattgatatttgggagatcattgaggccaatggcagaaaaacaaatatcgcaggataaaaattagaagaaagctatctgagaaaccgatttttgatgtgtgcattcatctcacagttaaacttttcttttcattgaacaattgggaaacactgtttttttataatctgtgaaattatgtttgtgagtgcattgaagcctaaggctaaaaagcaactataacaggataaaaactagaaggaaactttttgagaaactgctttgtgatgtgtgcattcatctcacagagataaccttacttttgattaagtagtttggaaatactttttttttttttttttttgagacggagtctcgctctgtcgcccaggctggagtgcagtggcgggatctcggctcacttcaagctccgcctcccgggttcacgccattctcctgcctcagcctcccaagtagctgggactacaggcgcccgccactacacctggctaattttttgtatttttagtagagacggggtttcaccgttttagccgggatggtcttgatctcctgaccttgtgatctgccagcctcggcctcccaaagtgctgggattacaggcgtgagccaccgcgcccggccggaaatactttttttgtccatgctgcaaatggacatgagagctcattgagtccaatggcaaaaaagcaaatatcccaggataaaaaccagaaggaagctatctgagaaaccgctttgtgatgtatgcattcatctcacagacttaaacctttcttttcattcagcagtttggaaacaaggatttggtagaatctgcaaagggatattttggagcacattgagtcctatagtgaaaaagaaaatgtcttcagataaaaactagaaagaagatttctgagaaactgctttgtgatgtgtgcattcttcacacagaggtaaacttttcttttgattcagcagtttggaaacactgtttttgtccattctgtgaactgacattttggagctcatggaggccaatggtgaaaaagagaataccccaggataaaaactagaaggaagctacctgagaaatcgttttgtgatgtgtgcattcatctcacagagttaaagcattctgttaattcaacagtttgtaaacactgtttttgtagaatccgcgaagggatatttggaagcacattgaggactattgtgaaaatgaaattatcttcagataaaaactagaaagaagcattgagagaaactgctttgtgacttgtacattcattttacagagttaaaatttcttttcattcagcagtttggaagcactgtttttgtccattctctgaatggacttttgggaggtcattgaggccaatggcaaaaaagtgattactccaggataaaaactagaaggaagctatctgagaaatggcttagtggtgtgtgtattcaactcacaaagttaaatctctcttttgattcagcagtttggaaacactggttttgtagaatctgcaaaaggatatttggagcacattgaggcctatagtgaaaaagaaaatatattcagataaaaactagaaagaatctttctgagaaactgctttgtgatgtgtgcattcatcttacagaattaaacttttcttttgattcagcagtttggaaacactgtttttgtagaatatgtgaagggatatttgggagcttgttggtgcgaatggtgaaaaagtgaatatcccaagataaaaactagaaggaagctatctgagaaacccctttgtaatatatacattcatctcatagactaaatcttttttttacttagcagtttggaaagactgcttttgtacaatctgtgaagggacatttggaaatgcattgagccctatagtgagaaagaaaatatcttcaggttaaaagttgaaggaagctttctgagaaactgctttgtgatgtgtccattcatctcacagagttaaatctttcttttaattcagctgtttggaaagactgtttttgtagaatctatgaagggatatttgggagagctttgaggcctatggtgaaaataaaataatcaaataaaaactagaaagaagctttctgagaaactgctttgtgatgtgtccattcatctcacagaatgaaacctttcttttggttgaagagtttggaaacactgtttttgtccattctgaggatggacatttgggagctcactgaggacaatggaaaaaaaggaaatgtcccaggataaaacctggaaggaatctatctgagaaaccactttgtgatgtgtgcattaatctctcagagataaactgcccttttaattcagcagtttgggaacactgttttgggagaatctgaaaaggagcttttgagagcactttgaggcctatggtgaaaaagaaaatatcttcagataaaaactagaaagaaactttctgagaaactgctttgtgatgtgtacattcatctcacagagttaaaactttcttttcattcagcattttgggaagtatgtttttgtccattctgcaaaaggacatttgggagctcattcagaccaatggcaaaaaagaaaatatcccaggataaaaactagaaggaagctgagaatccatttgtgatgtgcgcattcatctcacagagtgaaaattttcttttgatacatcagtttggaaacatggtttttgtagaacctgtgaagggatatttgggagcacattgaagcctaagttaaaaaagaaaacatattcagataaaaactagaaagaaccattctgagaaactagtttgtgatgcatgccttcatctcacagtgttaaacgtttcttttgattcaacagtttggaaatgctgtttttgtagagtttgtgaagggatatttgggagctcattgaggcatctggtgaaaagaaaatatcttcagataaaaacctgaaagaagctttgtgatgtatgcattcatctcatagagttacacttttttttctgatttaacagtttggaaatgctgtttatgtacaatctgcgaagggataatttagagcacattgaagccagagatgaaaaagaaaatattttcagataacaaccagaaagaagctttctgattaactgctttgtgatgtgtgcattcatctcacagagttaaacctttcttttgattcatcagttttgaaacactgttttttcccactctgcgaacagacatttgggagctattgaggccaatgacgaaaaagtgaatttcccaggataaaaaaaagaaggaatctactggagaaaccccttcatcatgtttgcattcacttcgtagagtgaatccattcttttgattcatcagtttttaaatactgtttttgtagaatatgagaagggatatttggaagcactttgaagcctatggtcaaaaagaaaatatcttcagataaaaactagaaagaatatttctgagaaactgctttgtgatgtatgcataaatatcacagagttaaacttttcattcagcagtttggaaaaattgtttttgtctattctctgaatggacacatgggaggtgattgaagccaaaggcgaaaaacaaatatcccaggaaaaaaactagaaggaagctatctggcaaacagctttgtcatgtgtgaattcatctggtagagtgaaacctttattttcattcagcagtttggaaacactgtttttgtaggatcagcaaagggatattttggagtgtattggggcctatggtgaaaaaaaaaccttcagataaaaactagaaagaaactttctgagaaactttttgatgtatgcattcaactcacaaagataaaactttctaatgattcagcactttggaaacactgtttttgtccattctgtgaatagatatttgggagctcattgaggtcaactgtgaaaaagtgaataacccaggttagaaatagatggaagctatctgagaaacccctttttgatgctcccattcgtctcgtgcattaaaccattcttttcattcagcagtttggaaacactgtttttgtagaatctgtgaagaaatatttgggagcgcattgaggccaattgtgaaaaagaacattacttcagataaaaactagaaagaagccttctgagaaactgcttagtgatgtgtgcattcatctcacagtgttaaaccttttttttgattcagcagtttggaaccactgttttttcttccattccgcaaatggacatttgggagctcactgagacaagagtgaaaaaacaaatattccaggataaaaactaaaaggaagctatctgagaaactgctttgtgatgtgtgctttcatctcacagacttaaacgtttcttctcattcagcagttttgaaacactgtttttgtagaatctgtgaagggatatttttgggtgctttgaggcctatggtgaaaaagaaataatcctgagataaatctagaaagaagctttctgagaaactgttttgtgatgtgtgcattcatctcacacagttcaaccttcctttttattcagaagtatggaaaaactatttttgtccattctgcaaatgaacatttgtgagctcattgaggcccatggcaacaaagtgaatatcccaggaaaaaaaggagaaggaaggtatctgagaaactgcttttggatgtgtgtattcatctcacaaaattaaacttttcttttcattcagcagtgtataaacactgtttttgtagaatctgtgaatggatatttgggagtgcattgaggcctgcggtgaaaaagaatatatcttcagatacaatctagaaagaagctttctgagaaacttctttgtgatgtgtgcatttttctcagagagttaaacctttcttttgcttcagtagtttggaaacactgtttttgtccactctgctaatggacatttgggatctcattgaggtcaatggtgaaaaacgaatatcccaggataaaaactagaaggaagctatctgagaaactgctttgtgatgtgtgcattcatctcacagattgaaacctttctcttcattcagcagtttggaaacactgtttttgtagaatctaaaaagagatatttaggagcgcattgagttaaaccattcttttgattcagcagttttgaaacagtgttttttgctttctgtgaatggacatttggaagctcattgaggacagtagagaaaaaagggaatattccagtttaaaaactggaaggaagctatctgagaaacctctttgtgatgtgtgtattcatcttgcaaagataaatggttcttttcattcagcagttttgaagcactgttttttgtagaatctgaaaacagatatttgggagtgcattgaggcctgtggtggaaaagaaaatatttgggagtgcatagaggcctatggtgagaatggaaatatctcccaataaaaactaaaatgaaggtttcttagacactgctttgtgatgtgtgcatgcatgtcacagagttaaaactttcttttgattgagcagtttggaaaccctgtttttatagaatctgtgattggatatttgggagtgcattgaggcctatggtgagaatggaaatatctcccgataaaaactaaaatgaagctttctgagacactgctttgtgatgtgtgcattcatgtcacagagttaaagctttcttttgattgagcagtttggaaaccctgtttttatagaatctgcaatcagatatttgggagtgcattgaggcctatggcaaaaaatgaaatatcttcagataaaaactagaaaaaagcttttttcagatactcctttttaatgtatgcgttcatctcacagaggtaaaccttacttttgattgaggagtttggaaacactgttttggtagaatctgggaagggatacttgggaatgcattgaggtctatggtgagaaaagaaatatctccaggttaaaactagaaagaagctttctgagaaactgcttcatttgtctacattcacctcatagagttaaatctttcttttgattgagaagtttggaaaaattctttttgtacaatttgtgaagggatattaggaagcacattgaggcctttggggaaaaaggaaatatcttaagagaaaaactagaaagaagctttctgagaaactgctttgtgatgtgtgcattcatctcacagagttaaacgtttattttgattgagcagtttggaaatattgtttttgtagaatctgcgaagggatattttgtgagtgcaataaggcctatggtaaaaaagcaaatatcttcagagaaaaaatagaaagaagctttctgagaaactgctgtgtgatgtgtatgttcatcacacagagtaaaaaatgtctttttattgagcattttggaaacactctttttttagaatatgtgaagggatattttggagtgcatttaggcctatgattaaataggaaatatcattacagaaaaactagaaagaagctttctgagaatctcttggtgatgtgtgcattcatcacacagagttaaacatgtcttttgactgagcaatttggcaacactgtttggagaatctgtgaaaggatagttgggagtgcattgaggtctatggtgaaaaaggaaataccttcagagaaaaactaggaagatttctcagaaactgctttgtgatgtgtgcattcatctcacatattaaatctttttttttttgattggacagtttggaaacattgtttttgtagaatccacgaagtgttattagggagagcattgaggcctatggtgaaaaacgaaatatcttaagataaatactagaaaaaagatttctgaccaacagtttgtgatatgtgtatttgtctcacagagttaaacctttcttttggttgagcagtttggaaatattgtttttgtacaatctgcaaagggatatttggaagcactttgaagccaatggtgaaaaatgatatatcttcagagaaaaactacaaagaagctttctgaaaaactactttgtgatgtgtagattcatctcacagagttaaaccttgcttttgattgagcatttggaaacactgtttttgtagaatctgcgaagggatatttgggagtgcattgaggcctatggtgagaaaggaaatatcttcagacaaaaaatagaaagaagatttctgagaaattgctttgtgatgtgtgcattcatcacacagagttaatcatgtcttttgattgagtattttggaaacactctttttgtagaatctgtgaacaaatatttgggagcacatggaggccaaagatgaaaagggaaatatcatcagaggaaaaactagaaagaagctgtctgagaaactacttggtgatgtgtgcattcatcacacagagttaaacatttcttttgattgaacagtttggaaactctctttggcagggaattgaagcctaaggtgttaggatatttggcagggaattgagtcttaaggtgaaaaagtaaataccatcagataaaaactaaaaagaagatttctgagaaactgctccatgatttgtgcattcatctcaaaaagttaatgtttcttttgattgaaccatttggaaacactgtttttgtagaatctgctaaggaacatttaggagttcattgaggcctatggtgaaaatggaaatatcttcagagaaaaactagaaagaagcttcctgagaaactgctttgtgatgtgtgcatttacttcacagaattaaaccttacttttgattgagcagtttggaaacactgtttttgtagaatgtgtgaagggatatttgggagcactttgaggcctatggtgagaaaggaaatatcttcagataaaaactagaaggaagctttctgagaaactgctttgtgatgtgtgcatttacttcagagagctaaaccttactttttattgagctgtttggaaacacttttgtagatgtgtgaagggatatttgggagtgcattgaggcctatggtgagaaaggaaatatcttcagataaaaactagaaagaagctttctgagaaactgctatgtgaagagtgcattcatctcacagagttacaactatattttgattaagcagtttggcaacagtttttttgtagaatgttagacgggatatttgggattgctttgaggactatgatgaaaagggagatatcttcagataaaaactaaaaaagaaacattctgggcaactcttttatgatgagtccattcatctcacagcgttaaacctttcttttcattgagcagtttggggagagtgtttttgtagaatcccagaagcgatatttgagagcgctttgatgcctatagtgaaaaacttaatatcttcagataaaaactagaaagaaggtttctgggaaactgctttgtgatgtgtgcattcatctcacagagttaaacctttcttttgattgagcattttggaaacactgttcttgtagaatctgcaaatggacatttgggagggcattgaggctgattgtgaaaaacaaattatcttcagataaaaactagaaagaaaatttttgggaaactgctttgtgatgtgtgcatccatctcacagagttaaaccattcttttgattgagcattttggaaacactgttcttgtagaatctgcaaatggacatttgggagggctttgaggccagttgtgaaaaacaaattatcttcagataaaaactagaaagaaagtttttgggaaactgctttgtgatgtgtgcattcatctcacagttaaaccattcttttgattgagcagcttggaaacactgctttagtagaatctgtgaagggatatatgggagtgctttgaggtttatggtgaaaaaggaaatatcttcagataaaaactagaaagaagcattctcagaaactgctttgtgatgtgtgcattcttcccacagagataaaactttcttttgattgagaagtctggaaacactgtcttggtagaatctacgaagggatatataggagcacctggaggcctatgatgaaaaaggaaatatcttcagagaaaaactagaaagaagctttctgagaaactgctctgtgatgtgggcattcatctcacagaggtaaacctttcttttgattgagcagtttgaaaacattgttttggtagaatctgggaagggatatttgggatcgcatagaggcctatttgtctatgggtcacatggagtctaaacagcatgtttatttctgctatattaaactcctgttaaaacagggtggtgtctgagtaaccacggaaaatacggccactctaatcaacatggtggaaaaacattgtccttggtttcctgaaaaaggaaacttagatgtagaagtatgggatcctgttgctgcaacattctgtgaactggtctccacagggaattatgttcctgtcactgtttggggtgattgggccttggcacatgccatcctgatgacataccaatcctgtgaccctctacagttaccacaattttatgaatctgatgacactccacctcttcctcaaccttcctctcctgcacagccttcgttatctgatcaccctctcccttcagctactccttcccccaactgtcgatgttgagaattcaatgtctaattccagtgactttggattacagtcaccccctgatgatcttatttctttccatgaagagctggtgcttgtagctcctgtggccccgattcacacagcccaggaccatatacatgctaattcttttcttttcaaacctacagagtcacctaatcgctctgggaccaaactaccatttacctataattctttaggccctcccccatccacttcaggccctcactctcctgtcatttcagttcctcaactggtcaccttgccatccactcagcctgcttctctttatccttcttcacatatggatgcccgtaatcaccagtatacttctgctccttctgctcccctaatgcccctttctcacactctcattctggtccgaccccctcaccctcagtttccctgatctacacatgtttttcctgtcacttctatgccgactccatctcagatgcctactctggaaacttcaatgcaatgcttattatgccaaaacaaagaaacaaatatattagatatgtggacttatctggtcgtgttagaccctcctaccttctaaggggtacaaatgcatcgttatgtacctcttaatcttacctttttaaaagaatttaaggatgcttgtactcagtatggtcctacttctccttatgttaaaatggtattacaaactttttgtattgaggtcattttgcttcctttagactgggacattttgtcaaaagctgttttaaccccatctcagcatttacaatttcgtatctggtggtcagaagaggcccattggcaggctcagctaaatcagactaatagcattctaattactcacgctcagctcacaggctccaatagtttctccgatgctcatgcccaattaaactttgatgttcttaccacagaaaaagtaacaaaggtgtgtatgatatctttggatacattatgcacttcaggccaagctcctgtttcttttaccacagttaaacaaggtaactctgaattatacactgattttttagcaaaattagaagatgctgttcaaaattatttctctgatgagcatgctcaaggtattctcctttgtatgttagattttgaaaatgcaaaccatgagtgtaaaatggccatgtgttctgtccaatgacaaaatttacctgatcacgaggtgttgcctgtatatattaaaggtagtgaagacactggatcagacacccacaaagctattctctgggcatgggccatggtggacaccaactaaactggtcccactaattattttcttggagtctgctataattgtggttaacttggtcatactcaaaaaaattgcactgtttaaagcctccaagctggatcaacaaacacagccaaatgctgctgctactgtttgcccacgttgtcgcaaaggtaaacattgggcaagtaattgccactctaagtatgatatagatggaaacctcctgccaaaacaccagggaaatggggactggggccaattctaggccctaatatcaaatgggatacttcagactcagatcaatgttgggtttccacttcaggcagtctcaacacagcccccattacaaacaaatttacctacagccaacccaaattagtccaagcctctccttctctctcagtacaatgcttgtccacctccacagtagggggtggggcagtcgatctctctagtactattcctttaaatttactacctaactctttgcctttaattgttcccacgggggtcactggccctttatctcgaggtttggtaggcctggtgttagatagggcatccacctctggtaaaggaatgaccattcgtaatggtctcattaattctgattccattgatgagattaaattaatcatgtctgccaaggttcctgtttccattctggctggtgagtcaattgctcaattgcttttactacctaatatcgttttaaacaaaggaggtaagacacatggccctggaattggctcttctggtgaaaagcctgatattggattattataatttctaaacaatggctcacctgcacaatacacattcaaggaaataagtttaagggactagtagatactggggctgatgtttctgttatttcctctactttacagccttcctcctggcttaaacatcctgccaacatggcactagtaggtgttggaaatgccaaggaagcttatgagagcacatttatcttgccttgcactggccctgattgtcaaaagggtacaattcggctttttatcacaccaatccccattaatctttggggtagagatttactggcacattggggggctgaaattaatattccacatgactcttatagtgcttccagtcagcatatgatggaaaacatgggatttgttcctggacttggtctcagtccaaaacgtgaagggattactaaacccctcccagttactgtaaaagaaaacagggctggtttaggttatccctatttatggtggccgctgtcacacctcctgatcctatctctttacaatggaaatctgacacacccctttggattcaacagtggctgctttctaaaaaataactggaggctttatctcacttggtttctgaacagttacaacttggaaatgtggaactttctctttcctcctggaattctcctgtgtttctagtaaaaacgacatcaggcaagtggctgatggtaaccaatttaagagtcattagctctgcaattaaatctatggtggcaatccaacctggcatgcctgcccctgatttaatacctttaataattagaacagcttttgccaaaaggtcccagtctaaaggaaacaaaatgacctcagtacaaaaagtttgtaataccattttaacataaggagaagtaggaccatactgagtacaatttacctataattcttcaggccctcccccgtccatttcagcccctcatcctcctgtcatttcggttcctcaactggtcactttgccatccactcagcctgcttttctttacccttcttcacatatggacacccataatcaccagtatatttctgctccttctgctcccccaatgcccctttctcacactctcattctggtccgaccccctcaccctcagtttccctatctacacatgcttttcctgtcacttctctgctgactccatctcaaatgcctactctggaaacttcaatgcaacgcttattacaccaaaacaaagaaacaagtaaattagatgtgtggacttatctggtcactctaataattcctcagggaatactaaatagccctacaatctgcccattttatgttgggcaagttctttcaccagttcaagcccaattttcccaggcctatattcttcattatattgatgatattttaattgctgcccacactgataaagaattaattgactattttcaaagtttgagccaccatgttacagaggctggattacacatcactcaggataaaattcaacagaccacttctgttcaatatttaggaatagtggtcaaaagacaacatattcaaccttaaaaagttgaaattaggagagactctttgaaaactttaaatgacttccaaaaagttttgggtaacattaattatgtaagacctactttaggcattacaacctatgcactgtctaaattgttttctatgctgcagggaaagtccaatctctgcagtctcagaactttgacccctgaggcttcaccagaactggaattcgtagaggaaagaatccaaaccactcagttatctagagtacagccatttcagccttttcaggttctggtttttgcttcattacactctcctactgtactaatagttcaacataatgatttagtggagtggtattttcttcctcattctgtgtcaaaaactttctctgtttatctagatcaaatggccactctaattggacaggcactgtgtagaatacttaaaatttctggatttgatccaaatttaattgtagttcctttaaatcggctcgaagttcaggccacctttcaacattctgtaccgtggcaaattcacttggctgattttattgccattattgacaatcattaccagaagaacaaattgtttgattttataaaaatgacatcttgggtggtccattgattaaccaaagatcagccctttcctgaggcctttacactgtgcagtgatggctccagtaatggcaatgctgattatgtaggtcctacagacaagcttatttgtaccccttacacctctgatcaaaaggcagagttaattactgtcattactgccttgaaggatttccccaaactgggaaatcttctttcaatagcaaataggagaaatatctttttgccttgtgacatttccccaaacctttaaatattgtctctgtatcttcatgtgatctctgtgacccacaccctattagtacactccctccccttttgaaaatcactaataaaaacttggtggttttgtggcttgcacggcatcaaggaacctgccgaaatgtgataactcccccagatacccagctttataatttctctcttttgtactctttccctttatttctcagactggctgacacttagggaaatagaaaagaacctacatgaaataaagttgaattatcaaggacgggttccccgataattttcattcatcagtttggaaacactgtttttgtaggatctgtgaagggatatttggcagcacattaaggcctatgttgaaaaagaaaatatcttcatacaaaaactagaaagaagctttcttagaaactgctttttgatgtgtgcattcatcccacagtgttaaacctttcttttgattcagtaatttgaaaaaactgcttttgtggattctgcaaatggacatctgggatttcattgagggcaatggtgaaaaagtgaatatatcaggagaaaaactagaaggaagctgtctgagaaattgctttgtgatgagtgcattcatcttgaagagttaaaccattcttttcattcagtagttgggaaacactgtttttttagaatcagtgaaggaatatttgggagcgcattgaggcctacagtgaaaaaatcttcagataaaaactagaaagaagagatctgaaaaactgctttgttatgtgtccatttatttaacagagtgaaacctttcttttgattcagcagtttggtaacactgtttttggcgattctgcgaatggacatttaggaactcattgaggccaatgatggaaaagtgaatatcccagaataaaaaccagaaggaaactatctgagaaaccactttgtgatatgtgcattcattttgcagagtgcaaccattcttttcattaagtggtttggaaacactgtttttgtagggtctgcgaagggatatttgggaacgcattgaggcccatggcaaacagaagatatcttcagataaaaagttgaatggaactttcagagaaactgtttgtgatgtgtacattcatctcacagagttaaacctttcttttgattcagcagtttggaaccactgctttggtccattctgcaagtggacatttgggagctcattgaggccaatgacaaaaaagtgaatatctcaggagaaaaactagaaggaagctatctgagaaaccactttgtgatgtgtgcattcatctcacagaattaaaggcttcttttaattcggcagtttgcagacactgtttttataggatttgtgaagtgatattttagaatgcatagaggcctatggtgaaaaggaaaatatcttcagatacaaaatagaaagaatctttctgagaaactgctttatgatgtgtgcattcatctcacagagataaactttcttttcattcagcagattggaaacgctgcttttgtagaatctgcaaactgatatttgggagctcattgaggcctatgctgaaaaagaatctatcttcatataaaagctagaaagaagctttctgagaaagggtttgtgatgtgtgcattcatcacacagagtttaacatttgttttgattcaggaatttggaaacactgtttttctccattctgcaaacagacatttgggagctcattgacgacaatggcaaaaaagtgaatatcccaggataaaaacaagaagaagctatctgaaaaaccgccttgtgatgtatacattcatctcacagaattaagcatttctattcattcagcagtttggaaaaactgcttttgtagaatctgtgatgggatatttgggagtgtttgagatctatggtgaaaaagaaaatatcttcataaaaaactagaaagaatcttttggagaagattgccacatgtgcattcatctcacatagttaaaactttcctttgattcagagttttggaaacactgtttttgtagaatctgtgaagggatatttgggagtgcattgaggtctatgttgaaaatgaatatatcttcagataaaaactagcaggaagcattctttaaactgttttgtgatgtgtgctttcatctctcatagttaatcctttctttctatttagcagtttggataaactgtttttgtccattctgcgaatgcacatttgtgagctcattgaggccagtggtgaaaaagtgaatatcccagcataaaaactagaaggaagctatctgagaaacctctttgtgacgtgtgtattcgtctcacagatataaacctgctttttcattcggcattttggaaacactgtttttgtagaacctgcaaagggatatttgagaatgcattgtctatggtgaaaaagaaaatgtcttcagataaaaactgaaaatgtttctgagaaactgctttgtgatgtgtgccttcatctcacagagtaaccatttcttttaattcagcagtttggaaaaactgtttttgtccattctgtgaatggacatttgggagcacattgagaccaatggagaaaaagtgaatattccaggataaagactagaaggaagctatctgaaaaatcactttgtcatgtgtgcattcatctcacagagataaaccattcttttcattaagcagcttggaatatccatttttgtagaatcagcaaagggatagttgggaggccatttatgccaaaagtgagaaagcgaatatcccaagataacttttagatggaagctgtctgagaaacccccttgtaatatgtgcattcatttcacaaggttaaacttttcttttcgttcagcagtttggaaacactgttttcatagaagctgcgaaggggtattttgaattgcattgaggcctagggtgaaaaagaaaatatcttgagagaaaaactagaaagatgctttctgagaaactgtcttgtgaggtctccatttatctaacagaatgaaagctgtcatttgattcagcagtttggaaactctgtttttgtccattttccgaatggacatttgggagctcattgaagacaatggcgaaaaagcaagtatccctggatgaaaactagaacaaagctatctgagaaattgctttgagatgtttgcattcaggtagcagagtgaaatattacttttcaatcagcagtttggaaacactatttgggagcgaattgaggcctgtggtgaaaaagaaattattttcagataaatacggaaaagaagctttcttggaaactgctttgtgatgtgtgctttcatctcacacagttaatcctttcttttcattcagcagtttgggaacactgtttttgtagaatctgtgaagggatatttgggagcaacttgaggcctatgggaaaaacaaaatatcttcagatatgaactagaaagaagatttctgagaaactgctttgtgatgtgtgcattcatcccacagagttaaacttttgttttcattcagcagcttggaaacactgtttttgtccattttgtgaatggatgttttggagctcattgaggtcaatggcaaaaaagcaagtatgccaggataaaaactacaaggaagcaatctgagaaactgctttgtgatgtgtgcattcatctcacatagttaaacttttctttttattcagaaatttggaatcactgtttttgtagaatctgcaaagggatatttgggagtacattgaggcctatagtgaaaaataaaatatcttcagagaaaaacaagaaagaaactttctgagaaactactttcaggtgtgtacattcatctcacagagttaaaacttttatttgattgagcagtttggaaacactgttttggaagtattgcaaaggtttatttgggagccaattgaagcctatagtgaaaaatgaagtacctttaaataaaaactagaaaaaagctttctcagaaactgctttgtgatgtgagcactcttctcacagtgttaaacctttcttttgattgagcagtttggagacactgttttggtggaatctgcgaagggatatttggaagcactttgaggcctatgatgaaaaaaggaaatatctacagataaaaactagaaagaagctttctgggaaacttatttgccatgtgtgcattcatcttacagagttaaacctttcttttgattgagcaatttggaaacactgtttttgtagaatctgctgagggatatttgggagcgctttgagggcaatggtgaaaaaggaaatatcttcagataaaaactagaaagaagctttctcagaaatcgttttgtagggtgtgcattcttctcacagagttaaacgtttgtgttgattgagcagtttggaaatactgttcttgtagaatctgcgatgggatatatgggagcacattgtggcctatgttgaaaaatgaaatatcttcagagaaaaactagaaagaaaccttctgagaaacagcattgttatgtgtttatttttctaacagatttaaacttttctattgattgagcagtctggaaacactgttttttttagaacctaagcagggatatatgggagagcattgaggcctatggtgaaaaagtaaatatcttctgagaaaaactgaaaagaagctatctgagaaatggctttttgatgtgtgcattcatctcacagagttaaatctttcttttgattgagcagtttggaaacactgttttggtagaatctgcgaagggaaatttgggagcactttcaggcctatggtgaaaaaggaaatatcttcagataaaaagtagaaagaagctttctgataaactgctgtgtgtagaatacattcacctcacagagttaaacttttgttttgattgggcagtttggcagcagtatttttgtagaatctcagaagagatattttgtagcactttgaggcctaaggtgaaaaatgaaatatcctcagattaaaactagaaagaagctttctgaggaaactgctttgtgatgtgtgtattaatctcacagagttaagcctttcttttgagtgagcagtgtggaaaccttcttttggtagaatcaggaaagagatacttgggagcgcatttaggcatatgatgaaaaagaaaatatctttagataaaaaccagaaagaaggtgtctcggcaactgctttgtgatgcaaacattcctccacagagttacaccttgcttttcattgagcaatttggtgacactgttttggaagtaactgcgtagggatattttggagtgcactgaggcctatggtgaaaaaggaaatatcttcagataaaaatttgaaagaagctttctcagaaactgctcggtgatgtgtgcattcttctcaaagagttaagccctacttttgattgagcagtttggaaacactgttttggtagaatctgtgaggggatattagggagcgctttgaggccaatggtgaaaaagcaaatatcatcagaagaaaactagaaagaagcattctgggaaactgctttgtgaggtttgcattcatctcacagagataaacctttcttttgattgagcagtttggaaacactgttgttgtagaatctgcagagggttatttgggagcccatttaagcatatgttgcaaaaggaaatatcttcagataaaaactggaaataagctttctcagaaactattttgtgatgtgtgcattcttctcacagagttataccttccttttgagtgagaagtttgtaaatactgtttttgtagtatctgaaaatggatatatcagagcagattgaggcacagagtgaaaaaggaaatatcttcacagaaaacaagaaagaagctttctgagaaacaacttcataatgtgtaaattcttctaacagggttaaaactttcttttgatggagcagtctggaaacactgttttggtagaatccactgagggatatatgggagggcattgatgcctatggtgaaaaaggaaatatcttcagagaaaaattagaatagaagctttcagagaaattactttgtgatgtgtgcattcatctcacagagttaaacctttcttttgattgagcagattggaaacaatgttttggtagaatcagtgaagggatattttggagtgtattgaggcctatggtgtaaaaggaaatatcttcagagaaaaagtacagggaagctttctgagaaactgctttgagatgagtgcattcttcacacagagtaaaacctttctttgattgggccacttggcaacagtgtttttgtagaatctgagaaaggatatttgggagcactttcaggcccatggtgaaaaacgaaatatcttcagataaaaactagaaagaaacattctgggaaactgccttgtggagtgtgccttcatctcacagagttaaccctttcatttgattgtgcagtgtggaaacactcttttgttagaaactgtgaagagatatttcggagcacattgaggcccatagagaaaaatgaaatatcttcagataaaaactagaaagaagctttctcagaaattgctttgtgatgtgtgcatccttctcacagcattaatcgtttcttttgattgagcagattggaaacactgtatgtgtagtatctgtgaagagatattttggagcacattgaggcctatggtgaaaaaggaaataccttcagattaaaactagaaagaagctttctcagaaaccactttgtgatgtatgcattcttctcacagagttaaacattccttttgatggagcagttcggaaatactgtttttgaagaatctgagaagggatatttcggagtgctttgcagcctatgttgaaaaagcaaatttcttcagatgaaaagtagaaagaagctttctgagaaactgtcatcttgggaatgagtgcaatcatctcacagagttagacctttttattgattgagcagtttggcaacaatctgcagttttaggcaatctgcagagggatatttgggatcgctttgaggcctatgctgaaaaaggaagtgtctttagaaaacaactagaaagaaactgtctgagaaactgctttgtgatgattgcattcatctcccagagttaaacctttctttcaattgagccgttttgaaacactgtttatgtggaatctgcgatgggacattttggagcgcttgtggcctgtggtgaaaaaggaaatatattcagataaaaactagaaagaaggttcctgagaaacagttttgtgatgactgcattcatctcacagagttaaactttcctttgattgggctgtttggcaacactgtttttgtagaacctgagaagggatatttgggacgatttgagacatatggtgaaaaaagaaacatcttcagataaaaaatagaaaaaaagatttccgggaaactgctttgcaatatgtacattcacctcacagagttaagcctttcttttgaatgagcagttgggaaacactggttttatagaatctctgaagggatatttgggagcactttgaagcctatggtgaaaaagtaattatcttcagaaaaaaactaaaaagaagctttctgagaaactgttttgtgatgactacatttttctcagagagttaaacctttcttttgattgagcaatttggaaacaatgtttttgtagaatctgcaaagggatattttggagctctttcatgccaatggtgaaaaaggaaacatcttcagataaaaagtagaaagaagttttctgagaatctactttgagatgagtgcattcatcacacagagttaaatctttctttgattgagcagtttggcaacagtgtttttgtagaatctaagggatatttgagagcattttgaggcctatggtgaaaaacagagtagcttcagataaaaactagaaagaagctttctgggaaactgctctgtgatgtgtgcattcatctcatagaattaaatccttctcttaattgagcagtgtggaaacacttttttgtagaatctgtgaagagacatttcagactgcattgaggcctatggtgaaaaaggaaaactagaaagaagctttcttagacacaactttgtgatatgaacattcttctcacagcattaaacttttcttttgactgagcatattggaaacactgtttttacagaatccacgaagagatatttgggagcacattgaggcctaaggtgaaaaaggaaatgtctcagatacaaactagaaagacgctttctaagaaactgtttattgatgtgtgcattcatctcacagagttaaacctttcctttgattgacgagtttggcaacactggctttatagaatctgcgaagggatatttgagagtgctttgaggcctatggtgaaaaatgaaatatcttcacagaaaactagaaagaagctttcagagaaactgctttggaatgagtgcattcatctcacagaattaaacctttcctttcattgaacagtttggcaacactgactttatagattcggcaaagggatgtttgggagcactttgaggcctatggtggaaaaggaaatatcttcagaaagaagctgtctgagaaactgccttgtgatgagagcattcatctcaaagagttaaacctttcttttgattgagcagtttggaaacactgtgttggtagtatctgcaaggggacattttggagtgctttaagtcctatgatgaaaaatgaaatatcttcagatatataatagaaagaagctttctcagaaaccgttttgtgatgtgtctattcttctcacatagttaaaccctttttttgattgagcagtttggaaacactgtattggaaatatctgtgaagggatatttgggagtgctttgaggcctatggtgaaaaaggaaatatcttcagataaaaaataggaagaaactttctgagaaactgctttgtgattaattcattcatctcacagagttaaacctttctttggattgagcagtttggcaacagtgtttttctagaatctaagaagggatattttgggatgctttgaggcttctggtgaataacgaaatatcttcagataaaaactagaaagaagctttctgagaaactgctttgtgatgagtgcattcttttcatggaattaaacctttcttttgattgaccagattggaaacattgtttttgtagaatctgcaaaggaatatttgggagctcttttaggtcaatggtgaaaaaggaaatatcttcagataaaaagtagaaagaagctttctcagaaactgctttgagataagagcattcttcacccagagttaaacctttctttgattgatcagtttggcaacagtgtttttgtaaaatctgagaagggatatttgggggcactttcaggcctatggtgaaaaacgaaatatctgcagataaaaactggaaagaaacattctgtgaagctgctttgtgaagtgtgcattcatctcacagagttaaacctttcttttgattgagcagtgtggaaacattgttttggtagaatttgtgaaaagatatttcggagcgcattgaggcttagggtgaaaaaggaaatgtcttcagataaaaactagaaagaaggtttcttagaaagcactttgtgacatgtgcattcttctcacagtgttaatcttttcttttgattgagcagattgaaaacactgtatttgaagtatctgtgaagagatatttgggagcatattgaggcctatgatgaaaaaggaaatatcttcagatacaaactagaaagaggctttctcagaaacatttttgtgacgtgtgcattcatctcacagagttaaacctttcttttaattgaggagtgtggaaatatttttgtgttgaatatgagaagagaaattttggagtgcttttaggcctatggtgaaaaaggaaatatcttcaaatgcaaactagaaagtagctttctgagaaactgctttggaatgagagcattcatctcatagagttaaacatttcttttgactgagcagtttggcaacactggctttatagtatctgcaaacggatattttggagtgctttgaggtctaaggagaaaaagggaatgtcttcagaaaaaactagaaacagcttttggagaaactgctttttgaagtgtgcattaatcacacagaatgaaaccttaatttgattgagtagtttgggaaaagtgttttcacagaatctgtgaaagggtatttgggagagactagggtgaaaaaggaactacattcacagaaaaactagaaagaagccttctgagaaactgctttgtgatgtgtacatacatctcacagagttaaacctctcttttgattaagcagtttgtccacagtgtgtttttagaatctgagaagggacagtaggaggcactttgaggcctatgatgaaaaatggaatatcttcagataaaaaatagaaagaagctttctgagaaactccttggaatgagtccattcgtctcacacagttaaacgtttcttttgattgagcagtttggcaacactggttttaaagaatctgtgaagggatatttgggagcgctttgaggcctatggtgaaaaagaaaatatcttcagaaaaaagtagaaagaaacgttctctgaaactgctttgtgatgagtgcattgttttcacagagttaaacctttcttttgattgagcagtttggaaacactgtttttgtagaatcttcgaaggtacattttggagcacattgaggcctatggtgagaaaggaaatatcttcagagaaaaactagaaagaagctttctcagaaaccgttttgtgatgtgttcattcttctcacagagttaaacttatcatttgattgagcagtttgcaaacactttgtataatattcaaagggactttttggagctcattgaggcctacagagaaaaaggaagtattttcagagaaaaaatagaagctttctgagaaactgctttgtgatgtgtgcaatcttctaacagagataatctttccttttgattgagcagtctggaaacactgcttttgtagaatcttcaaagagacatatgggagcgttttgaggcttacagcgaaaaaggaactatcttcttagaaatattagaaagaagctctctgagaaacagctttgtgatgtgtgcattcatctcacagagttaaaactttcttttgattgagcagtttggaaacactgttttggtagaatgtacgaagggatatttgggaaccctttcaggcctatggtgaaaaaggcaatttcttctaataaaaactagaaagaaattttctgagaaactgctttgtggtaagtacattcatctcacagagttaaacctttctttcttttgattgatcagtttggcaacagtgtttttatagaatctgtgaagggatatttgggaggcctttgaggcctatggtgaaaaatgaaatatcttcagataagaaatagaaagaagctttctgggaaactgcattgtgatgtctgcattcatctcacagacttaaacctttcttttgatgagcagtgtggaaacacgttttgatagaaactgcaaagagatattttggaacacttttaggcctattgtgaaaaaggcaataacttcagagaaaaactagcaagaagctttctcagaaaccgttgtgtgatgtctgcattcagctcagagtgttaaacccttcctttctttgagcagtttggaaacactatttagttagaatctgtgaagggatatttggaaatgcattgtggtatatagtgaaaaaggaaatatcttcggataataactagaagtcagttttttctgtaactgctttgtgataagtgcatttatctcacagagttaaacctttctgttgactaagcactttggaaacactgttttggtagaatctgtgaagggatagttggaagtgcattgtggcctgtggtgaaaaaggaaatatcttcagatcataactataaagaagctttctgggaaactgctttgtgatgagtgcattcatctcacagagttaaacatttctattcattgagaagtttggtaacagtgttttgtagaatcagagaagggatatttagaagcactttgaggcatatggtaaaaaacaaaatatctaaagatagaaactagaaataagctttctcagaaatggttttgtgatgtgagcattcatctcacagggttaaacctttctttggttgagcagcttggaaacactgttttggtaggttctgtgaagggatatttgggagtgcttccatggttatggtgaaaaagaaaatatcatcaggtaaaaactagaaagaagctttctgagaaactgttctgtgatgagtacactcttcacagagttaaacctttcttttgattgagcagtttgccaaaagtgtttctgtggaatctgagaaggaatattttggagccctttgaggcctatggtgaaaaatgaaatatcttcagataaaaactagaaagaaggtttctgggaaactgctttgtgatgtgtgcattcatctcaaagagttaaacttttcttttaattgagcagtgtggaaacactgtttttgtggaatctgtgaggagttattttggagtgcattgaggcctatggtgaaaaacgaagtatcttccaagaaaaactagaaagaagctttctcagaaatcgttttgtgatgtgtgcattcttctcacagagctaaacttttcttttgattgagcagattggaaaactttttttttttagaatctgagaagggttatatgagagtgcattgaggcctacggtgaaaaaggaaatatcttcagagtaaaactagaaagaatctttctaacatcctgctttgtgagatgtgcattcatctaacaaagttaaaactttcttttgattgagcagtctggaaacactgttttgtgcaatcttccaagggatatgagggagcacattgaggactatgatgaaaaaggaaatatcttcagataacaaatcgaaagaagcagtctgggaaactgctttgtgatgagagcattcatctcactgagttaatcctttcttttgattgagcagtgtggaaacactgtttttgaagaatctacgaagagatgtttgggggaacattgaggcctatagtgaaaaaggaaatatcctcagataaaaactagaaagaagctttctcagaaatggctttatgatgtgtgcattcttctcacagatttaaacttttcttttgatttagcagtttggaaacactgtttttgtagaatctgagaagagatattttggagcactttgaggcctaaggtgaaaaaggaaatctcttcagatgaaaattagaaagaagctttctgagaaactgccttggggtcatttcatttatctaacagagttaaaccatacttttgattgagcagtttggcaacacttgttttatagaatctgcaaaggatatttgagagtgcatttagccctatggtgaaaaaggaaatatcttcagataaaaactagaaagaagttttctgggaaacagctttgtgttgtgtgcattcatctctcagagttaaaaatttcttgttattgagcagtattgaaatattgaaacactgttttggaagtatctgtgaaggtatatttttgagtgcattgaggactatggtaagaaaggaactaccttcagataaaaactaaaagaaggtttctcagaaaccactttgtgatgtgtgctctgttctcaaagagttaaaccttatttttgattgagcgtttgaaaacactgttttggttgaatgtgttaagggatatttcggtgtgctttgaggcctatggtgaaaaaggaaatatcttcagataaaaattagaaagaatctttctaggaaactgctttgtcatgtgtgccttcatttcacagagttaaacctttcttttgatcaagcagtttggagaccctgtttttgtaaaatctgcagaggtgtatttgggagcaatttgaggcctatggtgaaaaagtaaatatcttcagataaaaaccgttttgtgatgtgtgcattcttctcacagagttaaatctttcttttcattgagcagtttggaaatactgtttattttagattctatgaagagatgtatgggagtactttgaggcctatggtgaagaaggaaatgtcatcagagaaaaactagaaagaagctttctgagaaactactttctgatgtgtgaattcatcctgcacaggtaaatttttcttttcattgagcagtttggaaacacggttttggtagaatctgtgaagggatatttggaagcgcattgtggcttatggtgaaaaaggaaatatcttcatataaaaactggaaagaagctttccaggaaactgctttgtgatgagtgcattcaactcacagagttcaacatttattttcattgagcaatttgggaacagtgtttttgtagaatctgagaagggatatgtggaagtactttgaggcatatggtgaaaaatgaaatatcttcagataaaatctagaaagaagctttctcagaaactgctttgtgatgtgagaattcatcccacagtgttaaacctttcctttgattaagcagtttggaagccctgttttggtagaatctgcgaagggatattttggagcactttctggcctatggtgaaaaaggaaatatcttcagataaaaactagaaagacactttcagagaaactgctttgtgatgtgtacactcctctcacacagctaaatcattcttttgattgagcagtttggcaacagtgtttttatagaatctgcaaagggatatttgggagtgatttgaggcctatggtaaaaaacaaaatattttcacataagaaccagaaggaatgtttctcagaaactgctttgtgaggcatgcattcatgtcacagagttaaacctttctattaattgagcagtgtagaaacactggttttatagaatctgtgaagagatatttgggagggcattgaggtctatggtgaaaaacgaagtatcttctgagaaaaattagaaaaacgctttctcagaaaccgctttgtgatgtgtgcattcttctaacacagttaaactttcttttgattgagcagattggaaactcagtttttgtagaatgtgagaatgtatatatgagagcaccttgagtcctagggtgaaaaataaactatcttcagagtaaaactagagggaaattttctgacatcctgctttgtgatgtgtgcattcatctcacagagttaaaacttccttttgattgagcagtctgaaaacactatttttgtacaatctgggaagggctatttggaagtgcattgagacctatggtgaaaaaggaagtatcttcagataaaaactagaaagaagctttctgataaactgctttgtgaaaagaaagctcaagctttcttttgcttgagcagtttggaaacaatgttttggcaggatctgcaaacagatatttggaattgcattgtgggctatggtgaaaaaggaaatatcttcagagaaaaactggaaagaaactttctgggaaactgctttgttatgtgtgcattcatctctctgtgttaaaacttcatttttattgagcagctttgcaacactgtttttgtagaatctgagaagggatattttgagtgctttgaggccaatggtgaaaaaggaaataacttcagacaaatactagaaagaagctttctcggaaactgctgtgtgatgtgtgcattcttctcacagagagcttaacctcgcttttgattgagcagtttggaaacacagtttttgtagaatctgtgaagagatatttggaaacacctcaaggactatggtgaaataggaaggaacttcagataaaattaggaagaagaattctgagaaactgctttgtgaggtgtacattcatcaaatacagttagaactgtcttttgattgagcagattgtaaacacggtttttgtagaatctgcaaaggtgtgtttgggagtgcattgaggcctatggtgaaaaaggaaatatcttcagataaaaactatacagaagctttctgagaatctgcttgatgatgagtgcattcttcttacagagttaaaactttcttttgattgagcagtttgacaacactgtttttgtagaaactgcaatgggacatttgggagagcattgaggcttacggtgaaaaaggaaatatcttcacataaatactagaaagaagaattctctgaaactgctttgtgatgagtgcattcttctcagagatttaaattattgttttgattgggcagtttggaaacactgtttgggtacaatctgagaagggatatttggagggcactgaggcctatggtgaaaaaggaaatattttcagacaaaaactagaaagaagctttctgggaaactgctttgtgatgtgtgaagtcttctcacagagtttaacttcacttttgattgagcagtttagaaacactatttttgtagaatctatgtaagcatatatgggagcacattgaggcctacattgaaaaaggaaatatcttcagagaaaaactttaaagaaacattctcagaaactgctttgtgatgttggcaatcatctcatggagtttaaacattcttttgattgagcagttgggaaacaatgtttttgtggaatctgagaagggttgtttgggaggggatagaggtctgtggtgaagaaggaaatatcttcagaaaaaaactagaaagaagcattctgggaaactgctttgtgatgtctgcattcatctcacagaactaaacttttcttttgattgcacagtttggaaacattcttttggtagaatctgcgaagggatatttgagaatgcattgaggcacacggtgaaaaaggaaatatcttcagataaaaattaggaagaagctttctaagagactgctttgtgatgagtgcattcatctcaccaggttaaacctttctttagattgagcagtttggcaactgtgtttttatagaatctaagaagggatttttggaatgctttgaggcctagggtgaaaaacaaaacatcttcagataaaaactagaaagaagctttctgggaaactgctttgtgatgtgtgcattcatttctctgtgttaaaactttattttgattcagtagttttgaaacactgtttaggtagaatctgcaaagggatatatgggagcatattgaggtctattgtgaaaaaggaaataccttcagggaaaaaccagaaagaagctttctgaaaaacggctttgtgatatgtgtattcatcgcacaaaggtaaaactttcttttaattgagcagttttgaaacactcttttggaagtatctatgaagggatatttgggagtgtattgaggcctatggtgaaaaagtaaatatcttcggataaaaaatagaaagaagcattctgagaaactgctttctgatgagtgcattcatctcatagtgataaaactttcatttcattgagaagtttggcaacactgtttttgtagaatctgcctaaggatatttgggagcactttgaggcctatattcaaaaattaaatatcttcagaaaaaactagaaagaagctttctgagaaacttctttgtgatgagtgccttcttctcacagagttaaacctttcttttgatggaggagtttggaaacactgtttttgtagaatctgcgaaggggtattttggagtgcattggggcttatggtgaaaaagaaatatcttcagataaatactagaaagaagctttctcgaaactgttttatgatgtgtgcattcgacttacagtgttaaaacattctggtgattgagcagttggaaaacattgttttggaaaaatctgccaagggatatatttgggagcccattgaggcctattgtgaaaaaggaaatatcttcagattaaaactagaaataagctttctgagaatctgtttttctataagtgcaatcatctcacagagtgaaacctttcttttctttgagtggtttggcaaaagtgtttttgtagaatctgagaagggatatttgagatcaccttgaggcctatgttgaaaaaggaaatatcatcagataaaaagtagaaagaagctttatggtaaactgctttgtgatgtgtgcgtttatctcacagagttaaacttttcttttcattgagcagtttggaaacactgtttttgtagagtctgtgaagggatatttggaagtgcattttggtctatggtgaaaaaaggaaatatcctcagataaaaataagaaagaagctttctgggaaactactttgtgatgagtgcaattatctcacagagttaaacctttcttttcattgagcagtttgggaacagtgtttttgtagaacctgagaagggaaatttgggagcactttgaggcctatgtggaaaatgaaatatcttcagataaaatcaagaaagaagctttctgggaaactgctttgtgatgtgtgcattaatctcacagagttaaacttttcttttgattgagcagtttggaaacattgtattgttagaatctgtgaagggatattttggagtgcattgaggcctatgagaaaatgaaatatcttcagataagaactagaaagaggttttctcagaaactgctttagaaagtgtgcattcttttcactgagttaaacctttgttgtgattgagcagcctgaaaaccctgtttttttgtagaatctactaagggatatatgggagtgcattgaggcttatggtgaaaaagcaaatatcttcagagaaaaactagaaagaagctttctgggaaactgattcgtgatgtgtgcattcatctcaaagagttaaacctttcttttgatttaacagtttgacaacagtgtttttgtagaatatgagaagggatatttcggagtgctttgaggccaatggtgaaaaaggaaataacttcagatgaaaatgagaaagaaactttctgagaaactgcttggaaagagtgcattcatctcacagagttaaacccttcttttgattgaacagcttggcagcactggttttatagaatctgagaaaggatatttgggagtgctttgagacctatggtgaaaaaggaaatatcttcagaaaaagtagaaagaagctcttttacaaactgttttgtgataagtgcattcatctcaaagagttcaaactttcttttcattgagcagtttgggaacgttgtttttgcagaatctgcaaagggacatttgggagcacatttaggcctgtggtgaaagaggaaatatcttcagataaatactagaaagaagctttctcagaagttgttttgtgatatgtgcactcttcccacagagttaaatatttcttttgatttagcaatttggaaacactgtttttgtagaatctgttgcgggatgtatgggagtgcattgaggcctatggtgaaaaaggaaatatcttcagagcaaaactacaaagaaactttctgagaaactgctttgtggtgcatgctttcttctcacagaatttagactttcttctgattgagcagcctggaaacactctttttgtggaatctttgaaggaatatacgagagcgcatttagccctatggtgaaaaaggaaatatcttcagataaaaactggaaagaagctttcttagaaacttctttgtgatgtttgcattcttctgacagagttaaacctttcttttgatttaacagtctggaaacactgttttggtagaatctgtgaagggatatttgggatcgctttgaggcctatggtgaaaaaggaaatatcctcagagaaaaactagaaagaagctttctgggaaactgtgatgtgtgcagtcatcacatagagttaaacatttcttttgattgaacagtttagaaaaactattttggtagaatctacaaaggaatatatgggagcacagtgagatctatggtgaaaaaggaaatatcttcagatgaaaactggaagaagctttctgtaaagtgctttctgatgtgtgcattcatcacacagagttgaacctttcttttgattgagcagtttggaaacactgttcttgtagaatatgtgaagggatattttggaatgctatgaggcctacagtgaaaaaggaaatatctacagataaaaagtagaaagaagcttatcgagaaactgttttgtgatgggtgcattcatgtcacagaattaaacctttcttttgacagagcagtctggaaacactgtttttgtagaaaccacaaagagatatatgggagtacttagaggagaatggtgaaaaaggaaatatcttcagaaaaaactagaaagaaactttctgagaaaccacttttttatgagtatattcatgtcacagagctaaacctttcttttgattgagcagtttggaaacactatttttgtagaaactgtgaagggatacttggcagtgcatggaggcctatggtgaaaaatgaaatatcatcagataaacactagaaagaagctttctcagaaaccgttttgtgatgtgtgcactcttttcacagagctaaactttccttttgattgagcagtatggaaacactgtttttctaaaatatgcaaagggatatttgggagcacattgtggcctaagatgaaaaaggaaacaccttcagaaaaaacattgaaagaagttttctcagaaactgctttgtgatgtgtgcattctcctcacagagttaaaacttgcttttactgagcagtttggaaacattgttttgatagaatctgtgaagggacactttgaagtacattgtggcctatcgtgaaaaaggaaatatcttcagataaaaagtagaaagaaaccttctaggaaattgctttatgatgggtgcattcatctcacagagttaaacctttcttttcactgagcagtttgggtaccgtatttttgtagtatctggaaagggatatttgcgagtgctttgaggcctatggtgaaaaatgaaatatcttcagataaaatctagaaagaaaccttctgggaaactgcttcatgaaaagtgcattcatccaatagagttaaacctttcttttgattgaggagtttggaaacactgctttggtagaatctgcaaagggatatttgggagtgcatttaggcctatggtgtaaaagaaaatatcttcagacaaaaaccaggaagaagcattctcagaaacagctttgagatgttttcattcttctcacagagttaaacccttcttattattgagctgtttgcaaacactgtttttgcagaatctcagaagggttatttagaaatgctttgaggcctatggtggaaaaggaaatatctgcagaaaaaaactaaaaagaagctttctcagaaaccgctttgtgttgtgtgcattcttctaacagagttaaagctttcttacgattgaacagtttggaaacactgtttttgtagaatctctgaagggatacatatgggagtgcattgaggtctattgtgaaaacagaaatatcttcaaggaaaactaggaagaagctttctgaacaactgtttgtgatgtatgcattcatctctcaaagttaaacctttcttttgattgaaaagtttggagacactgttttggtagaatctacgaagggatctttgggagtttctcagaaacaaaaaagaaggtttctgagaaactgctttgtggtgactgcattaatctcacagggttaaaccttgcttttgattgatcagcttggcaatggtgtttttgtagaatctgtgaagggatatatgggatcactttgagagacctgtggtgaaaaatgaaatatctgcagataaaaactagaaagaagctttctgggaaattgctttttgatgtgtgcattcttctcacagagttaaaacttccttttgcttgagcagttttgtaacactgtttatgtgaaatctgcaaagggaaatttgggagtgcattgaggcttattttgaaaaaggaaataccttcagataaacactagaaagaagctttctcagaaaccactttgtgatgtgtgcattcttctcagagttatacctttcttttgattgagccgttttgaaacactgtttatgtgaaatctgcaaacggaaatttgggagagcattgaggcttatttcggaaaaggaaatatcttcagataaatactagaaagaagtgttctcagaagctgcatggcaatgtgtgcattcttatcagagcattaaacctttcttttgattgagcagtttggaaacactttttttgtagaatctgcgaagggatatttggcagtccattgaggactaaggtgaaaaaggaagtatcttcagataaaaactaaaaagaagctttctgagaagctgctgtgtgatgagtgtattcatctcacagatttttacctttcttttgactgagcagtttggagaccctgtttttgtaaaatctacaaagggctatatgaggctgcattgaggcttattgtgtaaaaggaaacatcttcagataaaaactagaaaggagcattttgggaaacaattttgtgatgtgtgcattcatctgacagagttgaaactttcttttgattgagcagttttgaaacactctttttgtagaatctgcaagtggatatttggagcgctttgcagcctatggtggaaaagcaaatatcttcacataaaaagtagacagaagcattctgagaaacttctttttgatgtgttcattcttctcacagagttaaacctttctttggattgagcagtctggaaacactgtttttaaagaatctatgaagtgatatatgggagcacattgaggcctagggtgaaaaaaggaatatattcagagaaaaattaggcagaattattctgaaaaactgctttgtgatatgtacattcttctcaaagagataaacctttctttttttgagcagtctggaaacactgtttttgtagaatctgtgaagggatatttaggatcacattgaggcctatgctgacaaaggaaatagcctcagataaaaatagaaagtagccctctcagaaaccggttagtgacgttttgcattcctctcacagagttaaaccttcttttttattgagcagtttggaaacagagtttttgtagaatatgccaagagatatttgggagagcattgaagcctatggtgacaagggaaatatcttcagataaaaactagaaagacagtttctgagaaactgctctgtgatctgtgcatttttctcatagagttaaactttctttagattgagcagtctggaaacactgtttttgtagaatatgtgaaaggatatatgggtgtgcattgaggcctatggtgaaaaagggaataccttcagagaaaaactatagagaagctttctgagaaacagctttgtcatgtgtgcactcatctcacagagttaaatctttcttttaattgagcagtttggaaaccctgttttggtagaaactgcgaaaggatatttgggagtgcattgaggcctgtggtgaaaaaggaaatatcttcagataaaaactacaaagaagcttcctcagaaactgctttctgatgtgctgattcctctaacagagttaaaccttccttttgagtgagcagtccggaaacactgtttaatagaatctatgaagtgatatataggagcacattgaggcctatggtgaataagaaaatatcttcagagaaaaactagaaagaagctttctgagaaactgttttgtgatgagggcattcgtctcacagaggtaaacatttcttttcattcagaaatttggaaacaatgtttctgtagaatctgccaagggatatttgggagtggagtgaggcctatggtgaaaaaagaaatatattcagataaatactagaaggatggtttctgagatactgctttgtgatgcgtgcattcttctcacagagttaaaaatttctttagattgagcagtctggaaaaactgtttttgtagaatctacaaggggatatatgggaacacagagtggcatgtgctgaacaaggaaatatcttcagaaaaaaagtagaaagaagctttctcagaaactgctttgtgatggttgcattaatctcacagagttaaacatttcctttgattgcacagctttgaaacactgttttggaagtatctgtgaagggatatttgggagcatatggaggccaatggtgaaaaaagaattatcttcagatcagtactagacagaagctttctcagaaaccactttgtgacgagtaatcatctcacagatttaaaccttccttttgattgagcagtttggaaaaactgttttggtagaatctgcaaaggaatatttgggagcgctttgaaggctatggtgaaaaaggcaataacttcatttaaaaactataaagaagctttctcagaaactgctttgtgatggttgcattcatctcacagagttaaacctttcctttgattgtgcagtttggaaacactgttttagtggcatctgagaaaggatatttgggagctctttgaggcctatgcagagaaaggaaatatcatcaggtaaaaactagaaagaagctttctgacaaactgcttcatgatgagtgcattcatctcacagagttaaacctttcatttcattgagcagtttggcaacattgtttttttggaatctgagaggatatattttgtagtgctttaaggcctagggtgaaaaaggaaatatcttcagataaaaactggaaagatgctttctgggaaactgctttgtgatgtgtgcattcatctcacagagttaaaccttccttttgattgtgcagtttggaagcactgttgtggtagaatctgcaaagggatatttgggagcacattctttggtgaaaaatgaaacatcttcatagaaaaactagaaagaagctttctgagaaaccacttgctggtgtgtgtatttattgcacagagttaaacttttcttttcactgagtcatttgggaacagtgtttttttcaaacctgagaagagatatttgggagcattttgaggcctatgatgaaaaaggaaatttcttcagataataacaacaaagaagctttctcagaaaccattttggtttttctcattcttctcacagagtaaaatctttcttctgatgagcagtctggaaacactttttttgtagaatctatgaagggatatatgggagcgcattgtcggctacggtgaaaaaggaaatattttcagagaaaatttacaaacaagctttctgggaaattactttgatgcgtgcattcatcacacagagttaaactttattttgactgtgtcctttggaaaaactgtctttgtagaatccgtgaaggtatatttgggagcactttgaggcctaaggtgaaaaaggaaatattttcagatagaagctagaaagaagctttctgagaaactgctatgtgatgtgtgcaatcatctcacagagttgaacctttctttagtttgaacggtttggaaaatctgttctggaagaatctgcaaagggataattgggagcactttcagggctatgaccaaaaaggcaataacttcagataaaaactagaaagaagctttctcagaaaccgctttgtgatggttgcattcatctcaaaaggataaacctttcctttgatttcgcggtttggaaacactgttttggaagtatctgcgaagggatatttgggagcgcattgaaggcaatggtgaaaaaggaaacatcttcagatcaaaattaaaaagaagctttctcagaactactttgtgatgtgtgtgttcttctcacagagttaaatcattctttggattaagcgcttttgaaatgctgttttggtagcatctgcaaagggacatttgggagctctttgaagcctatgttgaaaaaggaaatatctgcagataaaaagtagaaagaagctttctgagaaactgctttggaatgagttcattcgtctcacagtgttaaacctttcttttcattgagcagtttggaaacacagttgtacaatctgagaagggatatttgggagcgatttgaagtctatggtgaaaaacggaatatcttcagataaaaactagaaagaagctttctgggtaactgccttgtgatgtgtgcattcatctcacagagttaaacctttcttttgattgagcagtttggaaacactcttttgttagaatctgcggggagatatttgggagcacattgatgtctctggtgaaaaaggaaatagcttcagagaagaactagaaaaaatcttcctgagaaactgctttgtgatgtgtgcattcatcttacagagttaaactcttcattttattgagcagtttgggaacagtgtttttgtagaatctgagaagagatatttgggagtgcttttaggcctatggtgaaaaacgaaatatgttcaggtaaaaactagaaggaagctttccgggaaacagctttgtgatgtgtgcattcatctcacagaggtaaacttttattttgattgagcagtttggaaacactgtttttgtagaatctggaaagcgatattttggagcgcttttaggcctatggtgaaaaaggaaacatcttcagataaaaacttgaaagaagctttctgagaaacagctttgtgatgattgcattcatctcacaggattaaacctttctttcatttgaacagtttggaaacactgtttttatagaatctgtgaagggatatttgggagcacattgaggcctatggtgaaaaaggaaatatcttcagatgaaaacttgaaagaagctttctgagaaacaactttgtgatgagtgcattcatctcacagaactaaaccttacttttgattgagcaatttggaaacgtggtttttctagagtctgcaaaggaatagttggaacgtgttgaggcctaagttggaaaaggagatatcttcagatgaaaactagaaagaagctttctgagaaacttctttttgatgtgtacattcttctaacagaagtacatctttctattgaatgagcagtttggtaacactgttttttcagaatctgtgaaggtatgtttaggaacgcattgaggcctagggtagtaaaggaaatatcctcagaaaaaaatgagaaagatttatgagaaatagcattgtgatgtgtgcattcatcccacagagttaaacctttcttttgattcagcagtttggaaacactttatgtgtagaatctgcaattggatctttgggaacccattgaggcatttggtgaaaaaggaaatatcttgagataaatactaggaagaagccttctcagaaactgccttgtgatttgtgcattcttctcacagatttaaacgtttattttgattgagcagtctggaaacactgtttgcgtgcaatcaatgaagggatatttgggagtgcattgaggcctatggtgaaaaaggaaatatcttcagataaatactagaaagaaactttctcagaaaccaccttgcaatgtgagaattcttcttacagagtgaaagctttttttttgattgagcactctggtaacactgtttttgtagaacatgtgaagggatatttgggaatacattgaggcctatcgtgaaaaaggaaatatcttcagatcaaaactagaaagaagctttctgagaaactgcttttgatgagtgcattcatctcacagaagtacacctttcttttgattgaagtttggcaacagtatttttgtagaaactgagaagggatatttggtagcacattgaggcctatggtgaaaaacgaaacatcttcagatataaactagaaagaagctttctgagaaactgctttgtgatgactgcattcatctcacaaggttaaacctttcttttgattgagcagtttggaaacaaagtttttgcagaatctgtaaagggatatttaggagcacattgaggcctatggtgaaaaaggaaataacttcagatgaaaactagaaagaagctttattagaaactggtttgtgatgtgtgcatccatgtcacagagttaaaattttgttttgattgagcagtttggaaataatgtttcggtagaatctgagaagggatatttgggagcatattgaggcatatgttgagagaggaaatatcttcagataaaatctagaaagaagcattctgagaaactgctttgtggtgtgtgcattcatctcacagagttaaacttttttttttgattgggcagtttggaaacactgtttttgtagaatctgcaatgcaatattttggagtgcttttaggggtatggtgaaaaaggaatatcttcagataaaaactagaaagaaactttctgagaaacagctttgggatgagtgcattcatctcacagagttaaacctttcttttgatcaagcagtttggaaacactgtttttatagaatctgcaaagggatatttgggaatgcattgaggcctgtggtgagaaaggaaatagcttcagatgaaaactagaaagaagatttatgagaaactgctttgtgaagagtgcattcatctcacagacttaaacctttttttgattgaggagtttggaaacggagtttttgtagaatctatggagggatatttgggaatgaattgaggtctatggtgaaaaaggaaataccttcacatataaactagagagaagctttctgagaaactgctttgtgatgtgtgcattcatctcacagaggtaaacgtttcttttcattgagcagtttggaaactctgttcttctagaatctgcaaagggatatttatgagctttttgaggcctaagttgggaaagcagatatcttcagatgaaaactagaaagaaactttctgagaaactgctttttgatgtgtgcattcttctaagagaattaaacctttgtattgaatgagcagtttggcaacactgtttttgcagaatctgtgaagatatatttaggaacacattgagggctatggtgaaaaaggaaatatcttcagaaaaaaatgagaaagatttcttagaaatagcattgtgatgtgtgcattcattcaacagagttaaatcattctttaattgaacagtttggaaacactgtttttgtagaatctgtgaagggatatttcggagcccattgagacctttggtgaaaaaggaaatatcttcaaataaaagctagaaagaagctttccaagaaactgcttttcgatgtgtgcattcatctcacagagtaaaacctttcttttgatagagcagtttggaaaaactgtttttgtagaatctgcaaagggatacttgggggagcattggggtctatggtgaaaaaggaaacatcctcagatgtaaactagaaagaagctttctgagaagcttttttgtgatgtgtgctttcatctcacagagttaaacttttattttgattgagcagtttggaaacacagtttttgttgactctgccaagggatatttaggagtacattgaggactatggtgaaaaaggaaataatttcagacaaaaactagaaagaagctttctcagaaacaggtttgtgaattttgcattcatctcacacagtaaaacccttcttttgatttagcagtttggaaatactgttttggtagaatctgcgaagggatatttgggagcacattgaggcctatgttgaaaaaggaaatatcttcagattaaaaacttgaaagaaacattctgagaaactgctttgtgatgagttcattcaactcacagagctaaacttttcttttaattgagtagtttgaaaatgctgtttttttggtatctgagaagagatatttgggagcactttgaggcctgtattgaaaaaggatataccttcaaataaaaactagaaagaacctttctgggaaaatgctttgtgatgtgttcattcatttcacagttaaacctttttttcaattgagcagtttggaaacactgtttttgtagaaccagcaaagtgatattttggagccctttaggcacatggtgaaaaaggaaatatcttcagacaaaaactagaaagaatgtttctgagaaacagctttgtgatgactgcattcatctcacagacttaaacctttcttttgattgagcagtttggaaacactgtttttatagagtctgtgaagtgatatttgggaacgcattaaggcctatggtgaaaatggaaataccttcagatgaaaactagaaagaaggtttatgagaaacttctttgagaagagtgcagtcatctcacagacttaaacctttcttcttattgagcagtttggaaacactgttcttgtagaatctgcaaagggatatttgggaacttattgaggcctatgttgtaaaaggagatatcttcagatgaaaactagaaagaatctttctgaaaaactcctttctgatgtgtgcattcttctaagagaattaaaactttctattgaatgagcagtttggtaacactgtttttgcagaatctgtgaagacatatttaggaacgcattgaggcctatggtgaaaaaagaaatatcctcagaaaaaaacgagaaagatttctgagaaatagcattgtgatgtgtgcattcatcccacagagttaaacctttctttagttgaacagtttggaaacactctttttgtagaatctgtgaaaggatatttcagagaccattgaagcctatggtgaaaaaggaaatgtcttcagataaaaaccagaaggaagcattctgggaaactgctttgtgatgtatgcattcagcacaaagagttaaatcttacttttgactcagcagtttggaaacactattttggaagtatctgccaagggatatttgggagcgcattgagtcctatggtgaaaaataaaatatcttcagaaaaaactagaaagaagctttctgagaaactgctttgtgatgagtgcttttgtgtcacagagataaacctttcttttaattgagcagttcagaaacactgttttagtagaatctgtaaggggatattgggcagtgcattgatgcctatggtgaaaaatgaaatatcttctgataaaaactagaaagaagctttctgagaaactgctttgtgatgagtgcattcatctcacagggtgaaaactttctttaatttagcgctttgacaccagtgattttgtacaatctgagaacagatatttgggagcacttggaggcctatggtgaataatgaatctgctttgagatttgtgtattcttctcaatgagttaaacttttgtgttgattgagcagtgtggaaacactgtttttttagaatatgtgaagggatattggggagcactttgacgtctatgtcaaaaaaggaaatatcttcagataaatactagaaagaagctttctcacaaactgtgttttgatgtgtgcattcttctcacagatttcaacctcacttttgattgagcagtttgaaaacactgtttctgtaaattataccaagggatatacacgagcactttgaggcatatggtgataaaggaaatatcttgagataaaaactagaaagaatctttctgaaatctgctttgtgatgtgtgcattcatctgacagaggtaaaccgttattttgattaagcagtttggaaacagtttctgtaaattctaccaaggtatatttgggagttcattgaggtctattgtgaaataggaagtatattcagagaaatactagaaagaacgcttctgagaaactgctttgtgatgagtgcatccatctcatagagttgaactttcttttgattgagcagtttggcaaccctgtttttgaagaatctgagaaaggacaattggtagtgctttgaggcctactgtgaaaaatgaattatgttagaaaaaactagaaagaagctttgtgggaaactgctttgtgatttgtgcattcagctggcagagttaatcctttcttttgattgagcagtttggaaacaatgtttttgtaaaacatgcaaagggatatttgggagtgcttcgaggccagtggtgaaaaaggaaatatcttcagattaaaactagaaaaagctttctggaaactgatttgtgatgtgtacattcttatcacagaggttaaccattattttcattgagcactctggaaacactgtttctgtaaaatgtaccaagggatatttaggagtgcattgaggcatatagtgaaaaagaaaatatcttcagatacaaattagaaagaaacatttctgagaaacagctctgggatgtgtgcattcatcatgtagagttaaaatttccttttcattgggccttttgggaacactgtttttgtagaagctgagaacggataattgagagtgctttgacaccaaaagtgaaaaaggaaatatgttagataaaactagaaagaagctttctgggaaattgctttgtgaattgtgcattcatctcacagagttaaacctttcttttgattgaacagtttggaaacactgtttaggcagaatctgcgaagggacatttgggagtgcattgaggcctatggagaaataggaaatatcttcagataaatactagaaagaactttctcagaaactgctttgtgatgtctgcattcttccaccagtgttaaacctttcttttgattgagcagtttggaaacactgtttgtgtacaatcaatgaaaggatacatgggagcacatgggggcctatggtgaaaagtgaaatatctttggagaaaaactagaaagaagctttctgagaaagtgctttgttatgtgtgcattcttctgagagtaaaacctttcttttgaatgtggaatttggaaactgtttatgtagaatctgcaaatgaatatatgggagtgctgaggcctatggtgaaaaaggaaatatcttcagagaaaaactagaaagaaatttctgagaaactgctttgtgatgtgcacattcttcacacagagttagccctttcttttgattgagccatctagaaatattgtttttgtggaatctacgaagggatatatgagattgcattgaggcctaaggtgaaaaaggaaatatctttagataaaaactacaaagaatctttctgagaaactgctacatgatgtgtacattcatctcgcatatttaaacctttcttgtgattgaccagtttggcaacaatgttttggtaaaatctttgaagggtatttgggtgagtgttgaggcctatggtgaaaaaggaaatatctgtagacaaataatagaaagaaggtttctggaaactgcattcatctcacagagttaaacccatcttttgattgagcagttcagcaactctgtttttgtggaatctgccaaggaatatttcggatgcattgaggcctattgtgaaaaaggaaatatcttcaggtaaatacttgaaggaagctttctggaaactgatttgttatttatacattcatctcacagtattaaaccataattttgtttgatcagtttggaaacattgcttctgtaaaattcaccaaggggtatttgggaatgtattgaggcctgtagtataaaaggaaatatcttcagataaaaaatagaaagacgctttctgagaaactgctttgtgatgagtgcattcacctcaaagagttcaactttttttttcaattgagtagcttggcaacaccgtttttgtagaatctgcaaaggggcatttttcagtgctttgaggcccatggtgaaaaaggaaatatcttcacataaacactagaaagaagttttctgagaaactactctgtgatgagtgcattcagctcacagaagtaaacctttcttttgattgagtagtttggaaacactgcttttttaaatctgtgaagggacatttggaagtgcattgaggcctatggtgaaaaaggaaatatctccagataaaagccagaaagaagctttctcagaaactgctttgtgatgtgtgcattcatctaacagagttgaacctttcttttgagtgtgcagtttggaaacactgtttttgtagaatttgtgaagggacatatgggagccctgaggcctatggtgagaaaggaaatatcttcagagaaaaactagaaagaaatttctgagaaactggtttgtgatgtgtgcattctttgcacacagttaaacctttcttttgattgattagtgtggatacattgtttttgtggaatctgagaagggatttgttggagcactttgaggcttatggtgaaaaaggaaacatcttctgataaatactagaaagaagcccctcagaaaccactttgtgatgtgtgcattcttctcccagagtttaatttcatttttgattaagcattttggaaacactgttcctgtaaattctaccaagggatatataaaagccctttaaggcctatggtgttaaaggaaataccttcagagaagaactacaatgaagcattctgagaatctgctttggaatgactgcattcatctcacagagttaaaccttccttttgattgagctgtttggaaacactgttttggtagaatatttgaaatgatatttgggagtgctttgaggcctataatgaaaaaggaaatatattgagaaaaaaataaaaagaagctttctgagaaactggtttgtgataagtgcattcatctcacagaattaaacatttctttttatggagcaatttggaaaaactgtgtttcagaatctctaaagggatatttaagagctccttgaagcctatggtgaaaaaggaaatgtattcagataaatactagaaagaaactttctcagaaactgctttgtgatatgagcattcttctcacagagtaaaacctttcttttgattcaccaggttggaaacactgtttttgtagaatctgcaaaaggatacttgggagcgcattgaggcctatggtgaaaaatgaaatatcttcagataaaaactagaaagaaattttctcagaaaccgctttgtgatgtgtgcattcttctcactgaactcaaccgttcttttgattgagcagtttggaaacactgttttggtagaatctgtgatgggatatttgggagcacattgaggcctgtagtgaaaaaggaaatagcttcagataaaaactagaaagaggctttctcagaaactgctttgtgaattgtccgttcttgtcccagagttaaacctttctcttcattgagtagtttgcacatgctgtttttatagaatctatgaagggatatttgggagtgctatgaggcctatggtgaaaaagaaaatatcttcagataaaatctagaaagaagctttatgagaaactgttttgtaatgagtacattaatttcatagagttaacccttttttgattgagaagttaggaaacatgatttttttacaatctgagaaggaatattttggagtgatttgaggcctatggtgaaaaacgaaatatcttcagataaaaattagaaagaatctttctgggaaactgctttatgatgtgctcattcatctgtaacagttaaaactctcttttgattgagcactttggaaacactgttttgttaggatccatgaaggaatatttgtgcactctttgagtcctatggtggaaaaagaaatatcttcagataaaaactagaaagaagcattctaagaaactgctctgtgaagagtgcattcacctcacagagttaaacctttcttttcattgggcactttggcaacactttttttgaattacttaagaagggatatttgggagtattttaaggctgagggtaaaaaaggaaatatcttcagataaaaactagaaagaagtattctgagaaactgctttgtgatgtgtgcattcagcatatagagttaaaactgttttgattgggcagtttggaaacactgtttttgtagaatttgagaagggatatttgggagctctttgaggcctatggtgaaaagggaaatatcatcaggtaaatactagaaaaaagttttctggaaaaagttttgtgatttgtgcattcatctcatacaattaaacctttcttttgattgagcaatttggaaacactgtttttttttagaatctgccaagggatattttggagtgctttgagtcctatggagaaaaagaaaatatcttcagataaatactagaaggaagatttctcagaaactgctttgtgatgtgtgcattcttctcacagagtttaacctcacttttcattgagcagtttggaaacactgtttctgtaaattctaaggagggatatatgggagcccattgatgcctatggtgaaaaaggaaatatcttcagacaaaaactaaaaagaagctttctgagaaactgctttgtcatgtgtggatttatgtcacagaggcaaacctttcttttgattgagcattttggacacactcttttgttagaatctgtgaagggatatttggatgtgcattgaggtctgtgttgaataagaaaatatcttcagttaaaaactagaaagaagctttctgagaatctgctttgtgatgagttcattcatctcacagagttaaatatttctattgtttgagcagttcagagaagggatatttgggagtgcattaaggtatatggtgaaaaaggaaataccttcagataaaaactgaaagaatctttctgagaaactgctttgtgatggatgcattcactttaaagaataaaaactgtctgttgattgagcagtttggaaacactgtttttgtataacctgcagaggtatattttggagcacatgtaggcctgtggagaaaaaggaaatatcttcagataaatactagaaagaagctttctcagagacccctttgtgacgtgtgcattcttcttacagagttaaacatttcttttgattgagcagtttggaaacactgtttttgtaggatatgcgacggtatatttgggagagtgttgaggcctatggtgaaaaatgaaatatcttcagataaaaactaaaaagaaactttcccagaatctgttttgtgttgcttgcattcttctcacagagttaaacctttcttttcattgagcagttatgacacactgtttttgtagactctgtggagggatatatgggagcacattgaggtttagggtgaagaaggaaatatcttcagagcaatactatataaagttttctgagaaacagctttgtgatctgtgaatttatctcacggagtttaacctttgtttttattgaggagtttggaaacactgttttggtagaatctgtgaaggaatattttgtatcgcattggggcctatggtgaaaaaggacacatcttcagataaaaaccagaaaaaagctttttgagatactgatttgtgatgtgtgcattcttctcacagagttaaacaggtattttgattgagcagtttagaaacccagtttttgtagaacctatgaagggatgtatgggagagcatagaggcctatggttgaaaagaaaataccttgagataaaaattagaaagaaattttcaaggaaactgctttgtgatgtgtgcattcacttcacagagttaaactttacttttgatggagctgtttgtaacactttttcttttttaaatctgagaagagatatttgggagcgttatgaggcatatggtgaaaaatgaaatatcttgaggtaaataatagaaagaagttttctgtgaaatggctttgtgatttgtgcattcatctcacataggcaaacctttgttttgagtgagccattcagaaacactgtttttttagaatctgcaagggaatatttgggagcacattgaggcctgtggtgaaaaaggaaatgtcttcagagaaaaactaaaaagaaactttctgagaaacttctttatgatgtgtgcattcttctctcaaagttaaatcttaatatgactgagcagtttggaaacatggtttttgtagtataaacaaagggatatatgagagtgctttgaggctcatggtgaaaaatgaaatgtcttcagagaaaacctaaaaagaatctttctgagaaactgttttgtgatgtgtgcactcagcacaaagagttaaacctttcttttgagtgagcagttaggaaacaatgtgttggtagaatctctgaagggatattttggagtgaatgtagacattgtgaaaaaagaaatatcttcagataaaaactggaatctttctgagaaactgcttggtgaccagtgcattcatctccccgagttaaacctttcttttgattgtgcagtctggaaacatggtttttctagtataagcaaagggatatatgtgttcactttgaggcccatggtgaaaaacaaaatattttcagagaaaatctgcaaagaacttttctgagaaactgctttgtgatctgtgcattcatctcacagagttaaaccttaatttgattgagtagtttggaaacactggttggcagaatctgtgatgggatatttggtagtgcattgaggcctattgtgaaataggaaatatcttaagaaaaaaattaaaggaagctttctgagaaatggctttgtgatgaatgcattcatctcacagaattaaaactttcctttgattgagcagtttggaaacactgtttatgtctaatctacaaaatgatatttgggaatgcattgagacctaggcaaatatctttagataaatactagaaagaagctttctctgaaaccactttgtgatgtgtggatatttctcacagagttaaacctctattttgattgtgcacttatttatttatttatttatttgaaacaaagtctcactctttcacccaggctggagtgcagtggtgtgatcttggcacactgcaagctctgcctcctgggttcacgccattctcttgcctcagcctcctgagtagctgggactacttgcacctgccacaaggccctgttaattttttgtatttttagtagaaatggggtatcactgtattagtcaggatggtctcgatttcctgaccttgtgatccacacgtctcagcctcccaaggtgctgggagtacaggcatgggccacgatgcctggccttgtgcagtttctaaacactgtttttgcaaaatttgtgaagggatatttgggagtgctctgaagcctatgaggaaatagtaaatatctttggaaaaaaaactaaaaagatactttctgtgagactgctttgtgttgagtgcattcatcacccagaattaaactctattaattgaacagtttggaaacactgttttttaagaatctgcaaagggatagttgggaccacattgaggcctatgtgaaaaaggaaatatcttcagataaatactagaaagaatctttctcagaaagccctttgtgatgtgtgtattcttctccaaaattaaacctttattttgattgagcagtttggaaacactgtttttgaagaatctgtgagggaatatttgtgagcgctttgaagcctatggtgaaaaaggaaatatcgtcagaaaattattggaaggaagctttctgggaaactgatttgagatgtgtgcattcatctcgcagagattagcctttcttttgattgagcagtttggagtcactgtttaggtagaatctgtgaagggatatttgggagcgcatagaggcctgaggtgataaaggaaatatcttcagacaaaattagaaaggagtattctcagaaaccgctttgtgatgtgtgcattcttttcacagagttaaacctttcttttgattgggcagtctggaaacacggtttttgtagtataaacaaagggatatatgggagcactttgaagcccatggtgaaaaatgaaataacttcagagaaaaactacaaagaagttttctgagaaactgctttgtttaactctcacagagttgaacttaatttgattgcgtagtttggaaacactgttttggcagaatctgcagtgggatatttgggaggacattgcgacttattgtgaaataggaaatatcatcagaaaaaaatgaaaaaaaagctttctgagaaactgctttgtgattagtgcattcatctcacagaattaaatctttctttcgattgagcagtttggaaacaatgttcatgtagaatctgcaaagggatatttgggaaaacgttcaggcctagggaaatagcttcatataaatactagaaagaagctttctcagaaactgatttgtgatgtgtggattcttctcacagagttaaaactgtcctttgattgtccagtttttaacccctgtttttgaagaatctgcaaagggatatttgggagccctttgaggcctatagtgaaaaaggaaatatcttcagataaaaactggaaagattctttctgagaaacagctttgtgatgtgtgcattcgtcacacagtggtaaacctttcctttgattgagctgtttcaatacactgttcttgtagaatctatgaaaggatatttgggagcactttgtggcctaaggtgaaatagtaaatatattcagaaaaaaacaaaaggaagcttcctgagaaactgctttgtgatgaggacattcatctcacagaaataaacctttctattgattgagcagtttggaaacactgtttttttagaatcagcaaagggatatttgtgagcacattgagggcatggtgaaaaaggaaaatctacagataaatactactaggaagttttctgcattcatctcacagaattaaacttctttttgattgaggagtttggaaacactgtttttgtagaatctgagtagggatatttgtgagcactttgtggcttatggtggaaaaggaaatatcttcagatgaatactagaaataagacttctgggaaactgctttgtgatgagtgcattcatctcacagagttaagcctttcttttgattaagcagtttggaatcaccgttttagtagaatctgctcaaggatatttgggagtgcattgggacctatggtgataaaggaaatatcttcagataaaaattagaaagaagctttcttggaaactggtttgtgatgtgtgccttcttctcacagagttaaacatttcttttgattgaacagtctggaaacatgtttttgcagcataaacaaagggatatatggcagcgctttcagtcccatggtgaaaagtgaaatatcttcagagaaaaactgcaaagaatctttctgagaaactgctttgtgaagtgtgcattcacctcacagagataaacttaatttcattgagcagtttggaaacactgttttggcagaatctgtgatggtgtacttgggagggcattgaggcctattgtgaaataggacatatcttcagataaaatctaaaaagaagccttctgagaactgctttgtgaggactgttttgtgaggactgcattcatctcacagaaataaaccattcttttgattgagcagtttggaaacactgtttacatagaatctacaaagggatatgtgggaatgcagcgatgattagggaaatatcttcatataaatactagaaagaagctttctcagaaactgctctgtgatgtgtgtattcttctaacagagttaaacctctctattaattgtacagtttcaaacactctttttgaagaatctgccaaggggtatttgggagcactttgaggcctttagtgaaaaatgaaatatcttcatataacaactagaaagaagctttctgagaaacagcttagtaatgtgtgtattcatcacacagtggtaaacttttcctttgattgagctgtttggaaacactgtttttgtagaatctgcaaaaggttattttggagtgcttttatgcctatggtgaaatagtaaatatattcagaaaaaaactgaaatgaagctttctgagaaaccgctttgtgatgagtgcattcatctcacagaaataaacctttctattgattgagcagtttggaaacactgtttttatagaatctgctaaggtatatttgggaggtcattgaggcctatggcgaaaaaggaaatatcttcagataaatactagaaagaagctttctcagaaactcctttgtgatgtgtgcattcttctcgtggaattaaacctttctttagattgagccgttttgcaacactgtttttttagtatctgacaaggaatatttgggagggctttgaagcctacgttgaaaaggaaatatcttcagataaaaactatatagaagctttctgggaaactgctttgtgatttctgcattcatctcagagagttaaacctttcttttaattgagcagtttgtaaacactgtttttttagaatttacaaagggacatttggaagctctttgaggcctatggtcaaaaaggaaatatgttcagataaaaagtagaaagaagctttctggaaacttctttctgatgtgtacattcttttcaaagaggtgaaccattattttgattgagaactctggaaacactgtttttggaaaatctgcgaatggatatttgggagtgtattgaggcctacagtgaaaaaggaaatatcttcagataaaaaatagaagaacttttctcagaaactgctttgtgatgtgtgcattcttctcacagaggtaaacctttattttgattgagcaatttgaatacactgtttttgtggaatctacgaagtgatatacagagtgcaatggggcctatggtgcaaaaggaaatatcctcggagaaaaactagaaagaagcattatcagaaattgcttttggatatgtgcattcatctcacagagttaaacctttcttttgattgagaagtttggaaactttgtttttgtagaatctgcaaagggatatttgggagtgcattgaggcctatggtagaaaggaaacatcttcagattaaaactagtgagaatcattttaagaaactgcttggtgatgagtgcattcatctcacatagttaaacctttcttttgattgggaagtttgaaaagacagtttttgcagaatcagcgaagggatatttgggagcacttagaggcctatggtgaaaaaggaaatatcttcagataaaaactacaaagaagctgtgtcagaaagcactttgtgtggtgtgaattcttctcacagagtttaacctcagtttgattgagcagtttggaaacactgtttctttaaattctaccaagggatatatggaagtgcattgaggcttatggtgaaaaaggaaatatcttcagggaaaaactagaaagaatatttatgagaaaccgctttgtgatgtttgcattcatctcatggttttaaaactttcttttgattgagtagtttggcaacactgtttttgtaccatctgtgaagggatatttgggagtgctttgaagcctatggtgaaaaaggaagtattttcagggaaaaagtagaaagaagctttctgggaaactgcttttgatgtttgcattcaggtcaaagaattaaaactttctattgacttagcagttttgggacactgtttttgtataatctgcagagttatatttaggagcacatggatgcctatggtgaaaaaagaaatatcctcagatttcctttgtcctgattgagcagtttggaaccactgtttttgtagaatctgtgaagggatatttgggatacattcaggcttatggtgaaaaatgtaatatcctcagataaaaactagaaagatttctgagaaagctttgtgatgtgtgttttcatctcacagttaaacctttctttgattgagcagtttcaaacaactgtttttgtaggatttgggaaaggatgtttgggaacacattgaggcctatggtcaaaaaggaaatactttcagaaaaaaaccagaacaaatcttttggggaaactgctttgtgatgtgtagattcatgtcacagttgcactattcttttgatgaggcagtttggaaacactgtttttgtagaatctgcgaagggatatatgggagcgcattgaggcatatggtgaaaaaagaaatatcttcatgtcaaaactagaaagacactttctgcagaactgctttgtaatgtgtgcatttgtctcacagagataacgctttcttttgattgagtagtttggaaacactgtttttatagaatctgcaaaaggttatttaggaatgcattgaggactatggtgaaaaaggaaatatcctcagatataaactagaaaactttctgattaacagctttatgatgtgtccattcatctcacagaattaaaattttctattgatgtagcattttggaaacactgtttttgtagaatctgcgaagggatatatgggagtacattgaggcctctggtaaaaaagaaactatcttcagataaaaacttaaaagaagctttcagattaactgctttgtgatgtgttcattcatctcacagtgttaaactttcttttaattgagcatcttggaaacactgtttttgtagaatctgcaaagtgatatttaggagcacattgagtcctatggagaaaaaggaaatatcctcagataaaaaagagaaaggagatttctgagaaactgctttgtgatgtctgcttccgtctcatagaatttaagcattcttttgattaagtagtttggaaacacagtttttgcagaatctgtgaaaggatatttgggaatgcatgggacgtatggtaagagaggatatatcctcacataaaaaccagaaagatgttttctgaggaactattttgtaatgtgtacattcttctcacagagttacaactttcttttggttgagcagttaggaaacactatttttgtagaatctgcgaagggatatttgggagtgcattgaagcctatggtgaaaaaggaaatatattcacataaaaactagaaagacattttctgagaaactgctttgtgatgtgtgcattggtctcacaaagataaggctttctatttatttagcagtttggaaacactgtttttgtagaatctgtgaaaggatacatgggaacgcaatctggcctatgttgaaaaaggaaatactctcagacaaaatcttgaaagaagttttctgattaactgctttgtgaagtgtccattcatcttacagagttaaactttatttccattgagcatcttggaaacacaattttgtagaatctgcaaagggataatttgtagcacattgtggcctatggtgaataaggaaataccttcacataaaaactagaaagaggctttctggaaattgctttgtgatgtctgcatttgtctcagagagtttaagcattcttttgattaagaagtttggaaaacagttttggtagaatctgggaaaggatatttgggagcacattggggcctatggtgagaaaggaaatatcctcagaagaaaaccagaaagatgctctctgaggaactgttttgtgatgtgtacattcatctcacagagttacgattttcttttgattgagcagtttggaaacactatttttgtagaatctgcaaacggatattttggaatgcaatgaggcctatggtgaaaaaggaaatatcttcacataaataatagaaataagctttctgagaaactgctttgtgatgtgtgcattcatctcacagagttacaattttcttttgattgagcattgttgtgggaagtcagcaaccacaaatggagggaccggctaaaggcatggtagaagaacataaattttgaagatttcatggacatttattagttccccaaattaatacttttatattttcttatgcctgtctttactgcaatctctggacataaattgtgaagatctcatgtacatttatcacatccccaatcaatgcccttgtgatttcctatgcctgtctttaatctcttaatcccatcatcttcgtaagctaaggaggatgtatgtcgcctcaggacccatgatgattgtgttaactgcacaaattgtttgtagagcttgtgtgtttgaacaatacgaaatctgggcaccttgaaaaaagaagatgataactgcaggttcagggagcaagagagataaccttaaacactgaccaccagtaagtctggcagaacttacttctcttctttcaaaagcaaatggaagaaatatcgccgaattctttttctcagcaaggaacacccctgagaaagagaatgcttccctgagggtaggcctctgaaatggctgctttgtgggtggccatcttttatggttgcagctgcaggggtgaaataagcccccgtctcctgcagccctcccaggcttattaggatgaggaaattcctgcctaataaattttgatcagaccagttgtctgatcaaaccctgtctcaaaccctgtctcctgataagatgttatcaatgacagtgtgtgcctgaaacttctttagcaattgtaattttgccccggtcctgtggttctgtgatcccgccctgcctccatttaccttgtgatatctcattatcttgtgaagcatgtgatctctgtgaaccacaccctattctacactacctacccttctgaaaatcactaatgaaaacttgctggttttatggctcagggggcatcatggaatgtgccgacatgtgatgcctcccctggacactcagctttaaaatttctctctgttgtattttatccctttatttctcagaccagatgacactaagggaaaataaaaaagaacctactagaaatgtcgggggtaaatttcacccgatatttggctgagtttctcctgataaagcatcttggaaacactgtttttgttgaatctgtgaagggatatttcggagcacgttgaggcctatggtgaaaaaggaaatatcttcacatacaaactagaaagaagctttctgagaaagtgctttctgatgtgtgcattcacctgacagttaatcctttcttttgattgagcagtttggaaagactgtgtttgtagaatctgcgatgggagatttggaagcatattgaagcctatagtgataaaggaaatatcttcagacaaaaactagaaagaagctttctgaaaaactgctttgtgatgtgtgcattcatctcacagagttaaacctttcttttggttgagcagtttggaaacactgttttggaaaaatttgcgaagagatatttgggaatgcattgaagcatatggtggaaaaggaaataaccttagataaaaagtaaaaagacctctgagaaacagcttcatgatgattggattcatctcacagtgttaaaactttcttttgatagagcagtttggaatcattgtttttgtagaatctgtgaagggatatttgggagtgcattgaggcctatggagaaaaagcaaatatcttcagataaaaaatagaaagaatttttccaagacactgttttggatgtgtgcattcccctcacagagctaaaggattctcttcattgaggagtatggaaatactgtttttgtagaaactgtgaaggaatatttgggaccactttgaggcctatggtgaaacaggaaatgccttagggtaaaagctagaaagaagctttctgagaagctgctgtgtgatatctacattcatctcacagagataaagcctacttttgatttagcagttttgaaacactgtgtagaatctgcaaaaggatgttttggagtgcattgaggactgtggtgaaaaaggaaatatcttcataaaaacctgaaagaagcttttggagaaactgctttgtgatgtgtgctttcatcacatagagttaaacaaatattttgatggagcactttggtaacactgtttttgtagaatctaggaagttatatttgggagcactttgaggtctgcagtgaaaaaggaaatattctcagatgaaaactagaaagaagctttctgagaaaatgctttgggatgtgcgcattcatctcacagaatttcacctttctgacatttgagcagttaggaaacactgtttttgtagaatctgtgatgggatattttggagtgcattgagacctactgtgaaaaaggaaacacctttacataaaaactagaaggatactttctcagaaacaaatttgtgttgtgtgcatttgttttactgagataaaactttcttttgattctgcagtttagaaacactgtttttgtagcatctgcaaaagcatacttgggaacgcaatgaggcctatagagaaaaaggaaatatcctcagataaaaaccagaaagatgctttctcaggaactgttttgtgatgtgtacattcatctcacaaagttacagctttcttttgattgagcagtttggaaacactatttttcttgaatctgcaaagggctatttgagaacgcaatgaggcctatggtgaaaaaagaaatatattcacatgaaaactagaatgatttctgagaaacagcttcgtgatgtgtgttttcatctcacagagttaatactttcttttgattgagaagtttggaaactgtttttctagaatctgcaaaggaatattagggagcacatggaggcctatggtgaaaaagacaatatcttctgatgaaaactagtaagaagctgtctgagacattgctttgtgatgtgtacattcacctcacacagagttaaaactttcttttcattgagcagtttggataaactctttttgtagaatctgcaaagggatatttggtagcaaattgaggcctagggtgaaaaaggaaatatcttcacacagaactagaaagacactttctgagaaactgctttgttatgtgtgcattcatggaatattttcacataaaaactagaaagaagctttctcagaaacagctttgtgatgtgtgaattcatcccacagagttaaatatttattttgattgaccagtttggaaacactggtttttagtgtctgtgagggatatttgggagagcatggagacctatggtaaaaaaaaaatcttcagatgcaaactagaaaggagttctctgagaaactgctttgtgatatgtgcattcatctcacagcattaaacatttgttttcattgagcagtttggaaacacagtttttgtagaatctgtgactgctttcatctcatagagttaaaactttcttttgatggatctgtttggaaacaatgtttttgtagaatctgcaaagggatatttgtgagtgtgatgatacctgtggtgaaaataaataaaatatcttcagacaaaaactacaagggagatttttgagaaactgctttgtgttgtgtgcatccatctcacagagtaaaacatttattttgatcgagcagtttggaaacactgtttttgtataatctgtgaagtgatgttaagtatcagaaaaaggcctatggtgaacaaggaaatatctttagataagaatggaaagaagtgttatgataaactgctttctgttgtgtgcattaatgtcactaagataagtccttctttttatgaaacagttcagaaacactgtttttgtataatctgcaaagggatatttgggagcacattgagccctatggcggaaaaggaaacatccccagagaagacctatacagaagctttctgagaaactgctttgtaatgtgtgcattcatctcacagaattaagcctttcttttgactgagccatttggaaacactgcttttgtttaatctgcaaaatgatattaggcagtgcaaaaagccaatggtgaacaaggaaatatcttcagaaaaaacctggaaagaagcattatgagaaactgctctctgatgtgtgcattcatctcacagaggtaagtctttcttttgatggaacagtttggaaacaccttttttttaaaatctgcaaagggatatttggaagtgcattgaggcctgtggtggaaaaggaaatatcctcagagaagacctatatggaaactttctgagaaactgctttgttatgtgtgcattcatctcacagagttaaatctttcttttgactgaggcgtttggaaacaccatttttgtagaaactgcgaaggcatatttcaaagcgcagtgatgcctatggtgaaaaaggaaatatcttcagataaaaactagaaagaaccttttttagaaactgctttgtgatgtatgaattcatttcacagagttaaacttttcttttgactgagcagtttggaaacactgtttttgtttaatctgcaaagtgttgtttggtagtgcaaataggcctattgtgaacaaggaaataccttcagataaaaactagaaagaagcgttatgagaaactgctttctgatgtgtgcattcatctctcagagttaaatccttcttttgatggaagagttcagaaacactgtttttatagagtctatgaagggatatttgggtgcatattgaggcctatggtggaaaagaaaatgtcttcagaaaagaactaggcagaagctatctgaaaaactgctttgtgatctgtgttttcacctcacagagttaaacgtttcttttgattgagtagtttagaaacactgtatttgtagaatctgcaaaggtatatttgggagcgcacagagacctatggtgaaaaacaaaatgtagtaggaaaaaaatagaaagaagcattttgagaaattgctctgtgatgtgtgtattcaactcacagaggtaaacttattttttcattaagcagtttgaaaacactgtttttgtagaatctgtgatgggatatttgtgagtgcattgtgcctatagtgttaaaggaaatatcttcggataaaaactagaaataagctttttgagaaactgctttctgatgtgtgcattcatcccccagagttaaaagtttcttttgactgagcagtttggaaacactctttttgcgctatcaacaaagtgatattaggtaacgcaaaaaaggctatggtgaagaaggaaatatcttcagataaaaatgggaaagaagctttatgagaaactgctttctgatgtgtgagttcaactcacagtgttaatcttgttttattgagcagttttgaaacactctttttgtaggatcagtgaagggatatttgggagtgcatcgaggcctatggtggaaaaggaaatatcttctgagaagaactacacagaagctatctgagaaactgttcgtgaagtgttcattcatctcacagagttaaattttcttttgattgagcagtttggaagtaaggtttttatagcatctgccaagagatatatgggagtgcaatgaagcctatgggatgaaggaaatatctttggacaaaaacaagaaagaagctttttgagaaactgctttgtgatgtgcacatttatctcacagacttagacatttcttttgattgatcagtttggaaacactgcttttgtagactctgcaaagggatatttgggagtgcatgaggcctatggtgaaaaaggaaataacttcagataaaaactacaaagaagctttctaagaaaaagctttgtgatgtgggcattcttctcacagtgttaaatgtttcttttgattgaggagtttggaaacactgtttttgtagaatctgcaaagggatatttgggagcacactgatgcatatgttgaaaaagcaaatatcttcctataaaagctagaaaaatcttcttgagaaactgctttgtgatgtatgcattcatctcaccgagttaaacttttcttttgactgagcagtttggaaacactgttgttgtagaatctgcgaagggatatttgggaatggattgtaacctattgtggaaaaggaaacatcttccaataaaaattagaaagaaggtttctgagaaactgcttcatggtgtgttcactcacctcactgagttaagccttctttttgattgagaagtttggaaacactgtttttgtagaatctgggaggggatactttgagcacagggataaatttgagtgctttgtggcctatgttgaaaaagaaatatcttcagataaaaactagagagaagatttctgagaaactgctttgtgatgtgtgcattcttctcacacagttaaacatttcttttcattgagcagattggaaacactctttttgtagaatctgcaaaggtatatttgggagcatattgaggcctatgttggaaaaggaaatatcttcagagaagaactagacagaacctatctgagaaacagttttatgatgtgtgcattcatcagagttaaacctttcttttgattgaacagtttggaaacaccgtttttgcggaatcagcaaaggtacatttgtgactgcactgaggcctatggtgaaaaaggaaatatctacagataaatagtagaaataagttttctgagaaactactttgtcatgtgtgcattcaacccacagaattaaacttgtttttcaattaagcagtttgcaaacactgtttatatagaagatgcgatgggatatttgggaatgctttgaagcctatggtgataaagtaaatatcttcagttagaaactataaagaagttttttgagaaactgctttgtgatgtgtccattaatctcacagggttaaacttttattttgaatgaggaacttggaaactctgtttttgcaaaatctgccaagcattattatgtggcacaaaatagcctatggtgaacaaggaaatatcttcagataaaagctggacagaagggttgggagaaactcctttctaatgtgtgcattcatctcacagagttaagtcattcttttgatggaacagtttgaaaacactgtttttgtagaatctgtgaagagatatttgggagcgcattgaggcctatggtggaagaggaaatatcttcagagaagaattaggaagaagctttctgagaaaatgctttgtgttgtgtgcatgtgcagtcatctcacagagttaaacctttcttttgactgagcagattggaaacactgtttttgtagtacctgcaaagggatgtttgggagctcattgaagccaatggtgaaaaaggaaatacctttggataaagactagaaggaagctttttgagaaacggctttgtgatgtgtgcattcatcttacagagttaaacctttcttttgactgagcagtttggaaaccctctttttgtatattctgcgaagtgaggttttgtagagcaaaactgcctattgtaaacaaggtaatatcttcagataaaaactggaaagaagcgttacaagaaactgctttctgatgtgtgcattcatctcacagagtgaactccattttttgatggaacagtttggaaacactctttttttagaatctgcaaatggatatttgggagtgcattgaggcctgtggtggaaaaggaaatatcttcagggaagaactagacagaagctatctgagaaactgctttgtgatgtgtgcattcatctcacagagttaaaactttcttttattgtgcagtttggaaacactgtttttgtattatctgcgaagggatatttgggagtgcattgaagcccactgttaaaaaggaaatatcttctgataaaaactagaaagaagctttttgagaaactgctttctaatgtgtactttcaactcacagagttaaaactgtttttgtttgagcagtttggacacaaggtttttgtagaatctgcaacgggatatttgggagtgcattgaagcctatggtgaagaaaaaaatatcttcagataaaaattagaaagaagctttttgagaaacttatgtgacttgtgcattcatctcacaacgataaacctttcttttgactaagcagtttggaaacaacgtttttgaaaaatctgccaagcaatattaggcaccattaaaaagactatagtgaacaaggaaatatcttcagataaaaactggaaagaagcgttatgagaaacagctttgtgttgtgcatgttcatgtgatgcagctaactccttctttatgtggaagagtttggaaacactggttttgtagaatctgcaaagggatatttgggagcatattgaggcctatggtggaaaaggaaatatcttcagagaagaaatagacataagttttctgagaaactgctttgtgatgtgtgcgttcatcttacagaattaaaactttctcttgattgagcagttttgaaacactatttctgtagaatctgtgaagggatatttgggagcacattgaagcctattttgaaaaaggaaatatctttggataaaaatgagaaggaagctttatgagaaactgctatatgatgtgtgcattcatcttacagatttaaacttttcttttgattgatcagtttggaaacactgtttaaagaggatctgcaaaggaatatttgggaatgcattgaagtatatggagacataggaaatatattcggataaaaactagaaagaagtaatttgagaaactgctttttgatgtacactctcatctcacagagttaaacctttcttttgattgatcagtttggaaacactgtttttgtagaatctgcaaagggatgcttgggagctcactgatgcctatggcataaagggaaatatcttcagaaaaaaactagaaagaacttgagaaactgttttctgatggatgcattcatcacacagagttaaactagtctttgactgagcagtttgggaacacggttttacaatcaattgcgaagcaatgttaggtagcgcataaaaggattatggtgaacaagaataatttcagagaaaaactggaaagaatcgttaaaagaaactgccttgtgatgtgcgcattcatctcacagttttaagtctttcttttgattgaacaatttggaaacactgtttctgtagattctgtgaagggatatttcagagtgcattgtggcctatggtggcaaaggaaatatcttcagagaagaactagacagaaactacctgagaaactgctttgtgatgtgtgcattcatctcacagagttaaactttttttttctttttgagcactttggaaacactctttttgtagaatctgtaaagggatatttgagagtacactgatgcctatagtgtaaaaggaaatatctttggataaaaactagaaagaagctttttgaggaactgctttttgatgtatgcattcatctcaaaaagctaaacttctcttttgacagagcagtttggaaacactgcttttgtataatctgtgaagtgatgctaggtagcataaaatagcttatggtgaacaagtaaataccttcagataaaaactggaaagaagcgttatgggaaactgctttctgatgtgtgctttcatctcacagagttcaatccttaatttaatggaacagttcggaaacacttttttttttcagagcacattgaggcctatgttggaaaaggaaatatcatcagagaagaactagacaagctatctgagaaacagctttgtgatgtgtgccttcatctcgcagagttaaacctctattttgattgagccttttggaaactgtttttgtataatatgcaaaggtatatttgggagctcgctgaagcctatggtgaaaaaggaaatatcttcagataaaaactaggaagaagctttttgagaaactgctttgtgatgtatgagttcaactcacagagttaagcttgttttctgatagagcagtttggaaacagtgtttttgtagaatctgtgaagggatatttaggagcacattgaagcctatgttgacataggaaatatctttggataaaaactagaaagaagctttttgagaaactgttttgtgaattgtgcatttgactcacagagatcaaactttcttttactgagcagtttggaaacactgttttatcaaaatctgtgaagcaatatcaggtagtgtaaaaaagcctatggtgaacaagaagacgtcttcagatgaaaactggaaagaagcgttacaagaaactgctttctgatgtgtgacctcatctcacagagttaagtccttcttttgatggaacagtttggaaactctgtatttgtagaatatgtgaagggatatttgggatcaaatttaagcctatggtgaaaaaggaaatgtcttcagttaaaaattggaaagcagtgttataaaaactggtttctcatgggtgcattcatctaacagagttaagtccttcttttgatggaataatttggaaacactgtttttgtagaatctgcaaaggggtatttgggagcatattgaggtctatggtggaaaaggaaatatcttctgagaagagctagacagaagctttctcagaaaatactttgtgatgtgtgaattcatctcatagagttaaaacttttttttgattaagcagtttggaaacactgtttttgcagaatctacgaagggatttttgggagcacattgaagcctatggtgaaaagggaaacatcttcaaataaaaactggaaagaagctttttcagaaactgttttgtgatgtgtgcattcatctcacagagataaaactttctttattttatcagtttggaaacactgtttttgtagtaactgcaaaaacgaatttgggagcccaagaggcctaaggtgaaaaaggaaataacttaagatgaaaactagaaagaagctttttgagaaaacagtttgtgatgtgtgcattattctcagagttaaacgtttcttttgactgagcagtttggaaacactgtttttgtagaatatgagaagggatgtttgggagtgcactgaggactatggtgaagaagaaaatatcttcggataaaaactagaaaaaagatatttgagaaactgctttgtgatgtttgcattcaactgacagaattaaaacttttttttgattgatctatttggagacacagtttttgtagaatctgtggagtgatattttgaagaatctgtgaagggatatttgggagcacatagagaagcctatggtgataaaaaatatctttggacataaactggaaagttttttgagaaacttgtttgtgatgtgtgcattcgtttcccatagttaaacaattcttttgactgagcagtttggaaacactgtttttgtgaaatctgtgaatcaatatttggtagcacaagaaagcctatgatgaaaagggaaatatctttaggcaaatatccagaaagaagcacaatgggaaactgctttctgatgtgtgcattcgtctcaaagagttaaatccttcttttgatggaagatttcagaaacactgtttatatagaatctatgagggaatatttgggagtgcattgaggcctgtggtggaaacggaaatatcttcagagaataacaagacagaagctttctgagaaactactttgtgatgtatgcattcaattcacagagttaaacctgttttttcattgagcagtttggaaacactgtttttttagaatctgtgatgggatatttgggaatgcattgaagcctatggtgatgaaggaaatatcatcagataaaaacgagaaagaagctttttgagaaacttctttttgatgtatgcatttgtctcacagagttaaacttttcttttgattgggcagtttggaaacactgtttttttagaatctgtgaaaggatgttaggtatcacaaaaaggccaatggtgaagaaggaaatatcttcagataaaaactggaaagaagcattatgagaaaatgctttctgctatgtgcattcatctcacagatttaaatccttctttcacaaggacagttaggaaacactgtgtttgtagaatctgcaaagggatattttgaagtgcagtgaggcctaatgtggaaaagaaagtatcttcagagacgaattagacagaagttatctcagaaactactttgtgatgtatgatttcctctcacagagttaaacttttcttttgattgatcagtttggaaacactgtttttgtagaatctgtgaagctatatttgggagcaccttcaaacctatggtgataaatcaaatatcttcggataaacactagaaaaaagttattgagaaattgctttgtgatgtgagcattcatcttgcagctttaaacatttcttttgactgagcagtttggaaacaccttttttgcaaaatctgtgaagtgaatttaggtagtgcagaaaagcctatggagaaaaagaaagtatcttcagataaaaagtgaaaagaaacgttatgagaaactgctttctgatgtgtaggataatctcaaagagttaaacttttcttttgattcagcagtttggaaacatggtttttgtagaatctgtgaagggatatttggcagcacatgggaacatatggtgaaaaaggaaatatctttggataataatgagaaagaagtttttgagaaactgacttgtgatatatacaatcatctaacagagttaaacttttctttgattgatcagtttggagacactatttttgtagaatatgcgatgtgacattggagagtgcatgaggcctatgttgaaaaaggaaataacttcagataaaaaccagaaagaagctttctgagaaactgcttagtgatgtgtgcattctcctcacagagttaaacgtttcttttattgagcagtttggaaacactgtttttgtagaatgtgcaaagggatatttgggagcacactgatgcctatggtgaaaaaggaaacatctttggataaaaactagacagaaggtttttgagaaacttctttgagatttgtgcatttagctcacagagttaaacttttctatagactgagcagtttggaaccactgtgtttgtgtaatctgtgaagcgatgtttggtagctcaaaaacacctatggtgaacaaggaaatatcttcagataaaaactggaaaaaaacatgataagaaagtgctttcttatgtatgcattcatctcacagagttatatccttcttttgatggaacagtttagaaacaatgttttttatagaatctgcaaagggttatttaggagtgtactgtgttctgtggtggaaaaggaaatatctttggagaagaactagaaagacgctttttgagaaactgctttgtgatatgtgcattcacctcacagcggtaaacttgtttttgattgagcagtttcaaaactctgtttttgtagaatctgcaaatggatatttgggagcacattgaggcctaaggtgataaacgaaatatcttaggataaaaactagaaagaagctttctaagaaactgatttgggatgtggactttcatctcacagatttaaacctttcttttaactgagcagtttggaaacgctgtttttgcaaaatttgtgaagtgatattaggtagtgcaaaaaagcctttggtgaaaaaggaaataaattcaaataaaaactggaaagaagcattaggagaaactgctttctgatgtgtgcattcagctcacagagttaagttctttttttgatggaatagtttggaaacgttgtttttgtagaatatatgaagggatatttgggagcactttgaggcctctggtgtaaaaggaaaaatcttcagagaagaactagacagaagctatctgagaaactgctttgtgatatgtgcattcatctaacaaagttaaaccattcttttgattgagcagttcggaaacactgtttttgtagaatctgcgacaggatatttgggagagcatggaagcctatggtgatcaaggaaatatgttcatataaaaacgagaaagaaacattttgagaaactgctgtgtgatgtgtgcattcatctcacagatttaaacctttcttttgattgagcagtttggaaacactgtttttacgaaatctgcaaagggatatttgggagcacactgatgcctatggtggaaaaggaaatatctttgtataaaaactagaaactttttgagaaactgctttgtgatgtatgtattcatctcacagaggtaaacttttcttttgaatgagcagtttgaaaacactggttttgtagaatctgcaaagagatagtggagtgcattgaggcctgtggtggaaaaggaaatatcttcagagaagaactagaaagaagctttctgagaaactgcttcatgatgtgtgcattcatctcacagagctaaagtttcttttggctgagcagtttggaaacactgtttctgaaaaatctgcaaagggatatttgggagcacactgatgcctattgtggaaaatgaaatatctttgtacaaaaactagaaagaaactttttgagaaactgctttgtgatgtatgtattcatctcacagaggtaaacttttcttttgactgagcagtttggaaacattgtttttctataatctgcaaagggatatttgggagcacattgaggcctgtggtggaaaaggaaatatcttcatagaagaactagacagaagctttctgagaaactgctttgtgatgtgtgcattcatctcacagagctaaagctttcttttgatggagcagtttggaaacaatgtttttgcaaaatctgcaaagggatattagggagcacactgaagcctatggtgaaaaatgaaatatctttggataaaaactagaaagaaactttttgagaaactgctttgtgatgtatgtattcttctcacagaggtaaacttttcttttgactgagcagtttggaaacactgtttttctataatctgcaaagggatatttgggagcacattgaggcctatggtggaaaaggaaatatcttcagagaagaactagacagaagctttctgagaaactgctttgtgatgtgtgcattcatctcacagagctaaagctttcttttgattgagcagtttggaaacactgtttttgtagaatctgtgaagggatatttgggaggtaattgaagcctgtggtgaaaaaggaaatatcttcagataaaaagtaaaaagaagctctttgagaaactgctttgtgattatcaggtgaaattcacccctgatatgtcacgtaggttcttttctattttccctaaatgtcagcccatctgagaaataaagggacggagtgcaagagagaaatttgaaagcttggtgtccggggtagacatcacattgctgcaggttctgtgatgggccacaagccacaaagccagcaagtttttactagtgattttcaaaaggggaaggagtatacggtagggtgtggatcacagagatctcaggcttcacaaagtaataagatatcacaaggtaaaaggaggtggggcaagattacaggacacaggactggagtgaatttaaaattgctaatgaagtttctggcttgcattgtcattgatatcatcttatcataaacagggtttgagagcagaaaactggtctgaccaaaatttattaggcgggaattttctcctcctaataagcctgggagagctacaggagactggggctcatttcatctctacagctgtgaccataaaagacagccacccccaaagcagccatttcagatgcctaccctcagggatgcattatctttctctgggatgtttcttgctgagaaaaagaattcagagatacttctcccatttgctttgaaagaagagaaatatggctctgttccaccaggctcaccaggagtctgagtttaaggttatctatcttcttccctgaacattgctgccaccctgttctttttccaaggtacccagatttcatagtgttcaaacacacatgctctacacacaatttgtgcagctaatgcaatcatcacaggatcctgaggtgacatatatcctcctcactctctagtgagatgaacccagtaccacagatggaaatgcagaaatcacctgtcttctgcgtcgctcatgctgggagctgtagaccagagctgttcctatttggccatcttggctcctcccctgaacctttcttttgattcagctgtttggaaacactctttttgtagattccacaagtggatatttggagcgctttgaggcctattgtggaaaaggaaatatcttcacataaaaactacatggaacatcctgagaaactgctttgtgatgtgtgcattcatctcacagagttgaaaatttcttttcattgagcagttttgaaacactttttctgtagaatctgcaaggggatatttggtgccattttaggcctattgtggataaggaaacatcttcacataaaaactgcacagatgcattctgagaaacttctttgtgatgtgtgcattaatgtcttagagttgaagctttcttttcattgagcagtttggaaacactctttttgaaggatctgcaagtggatatttggaacgctttgaggcctatggtggaaaaggaaatatcttcacataaaaactacactgaagcattctgagaaacttctttgtgtcgagtgcattcaactcacagagttggaactatattttgatagagcagttttgaaactctctttttgtagaatctgtacgtgggtatgtggagttgtttgtggctaatggtggaaaaggaaatatcttctcataaaaactacacagaagctttctgagaaacttctttgtgatgtgtgcattcatctcacagggttgaaactttcttttgattgagctgttttgaaacactctttttgtagaatatgcaggtggatatttggagcactttgaggcatattgtggaaaaggaaatatcttcacatacaaagtacgtggaagtattctgagaaacttctttgtgatgtgtgccttcatctcacagagttgaacatttctctgagctgtttggaaacactctttttgaagaatgtgcaagtggacatttggatcactttgaggcctatggtggaaaaggaaatatcttaaaataaaaattacaaagaagtgttctgtgaaacttctttatgatgtgtgcattaaactcacagtgttgaacctatcttttgagtgagcagtttggaaacactctttttgtagaatctgcaagtggatatttggagcgctttggggtctattgtggaaaaggaaatatcttcacataaaaactgcacagaagcattctgagaaactgctttgtgatgtgtgcattaatctcacagagttgaacatttcctttgatggagcagttttgaaacactctttttgtagaatctgtaaggggatatttggagtgcttttaggcctaatgtgtataaggaaatatcttcacataaaagatacacacatgctttttgagaaacttctttgtgatgtgtgcattagtctcacagagttgaggctttcttttgattgagcagtttggaaacactctttttgtgggatctgcaagtggatatttggaacactttgaggcctatgatggaaaaggaaatatcttcacataaaaactacacagaagcattctgagaaactactttgtgatgtgtgcattcaactcacagagttgaacctatcttttgatggagcagttttgaaactctctttttgtagaatctgcaagtgggtatttggagcctttctggccaaaggtggaaaaggaaatatgttcacataaaaactacacagaagccctctgagaaacttctttgtgatgtgtgaattcatctgccagagttgaccctttctgttgaatgagctgttatgaaccactttttttttgtagaatatgcaggtggatatttggaacattttgaggcctaaggtggtaaaggaaatatatacaaataaaaactatacagaagaattctgagaatcttctttttgatgtgtgcattcaattcacagggttgaacctatcttttgatggagcagttttgaaactcactttttgtacaatctgcaagtgaatatttgcagcactttgaggcctatggtggaaagagaaatatcttcacataaaaactacacagaagcattctgtgaaacttctttgtgatgtgtgcattcatctgacagagttgaacttttcttttgattgagcagtttggaagcactctttttgtagaatctgcaagtggatatttggagtcctttgaggcctattgtggaaaaaaaatcttcacataaaatctacacggaagcattctgagaaactgctttgtgatgtatgcattcatctcagagagttgagcattatttggatttagcagttttgaaacactccttttgtagtatctgcaagtggatatttggatctctttgaggactaagtttgaaatggaaatatctccacataaaaaccacacagaagcattatgagaaaataatttgcaatgtgtgcattcatctaacagagttgaacatttcttttgattgagcagttttgaaacactcttttagtagcaactgcaagtggatatttggagtgctttgaggactattgtggaaaaggaaatatcttcacataaaaactacacagaagcatcctgagaaagaactttgcaatgtgtgcattcatctcaaagtgttgaaacattcttttgattgagcagtttggaaaaactctttttgtaggatctgcatatggatatttggaacgttttgaggcataaggtggaaaaggaaatatcttcaaataaaaactacacagaagaattccgagaaacttctttgtgatatgtgcgttcatctcacagagttgaacccttgttttgattgagcagttttgaaacaatctctatgtagaatctgcaggtgtatatttggactgctctgaggcctgttgtggaaaaggaagtatcttcacataaaaactacatagaaatattctaagaaacttctttgtgttgtgtgcactcatctcacagagttcagtctttcttttgattgagctgttttgaaacactcttgttgtagaatgtacaggtggaaatttggatcgctctgaggtgtattgtggaaaaggaaatatcttcacataaaaactacatagaaacattttgagaaacttcttttcaatgtgtgcattcatcacacagagttgaatttcttttgattgagcagtttggaaacactctttttgaaggatatgcaagtggatatttggatcactttgaggcctatggtggaaaaggaaataacttcacataaaatctacacagaagcgttctgagaaactactttgtggtgtgtgcactcatctcacagagttgaacctttcttttgattgagcacttttgaacaccctttttgtagaatctgcaagtggatatttagaattctttgtggactattgtggaaaaggaaatatcttcacttaaaaactacacagaatactgagaaacttatttgtgatgtgtgcattcatctcaaagtattgaagatttcttttgattgagcagtttggaaaattctttttgaagaatctgaaagtggatatctggagccatttgaggcctaaggtggaaaaggaaatatcttcacacaaccactacacagaagcattctgggaaagttctttctgaagtgtgcattcatctcacaggtttgaacgtttcttttgattgtgtagttttgaaacactcttttctagaatctgcaggtggattttctgactgctttgaggcttattgtagaaaaggaaatatcttcatataaagactatacagaagcattctgataaacttctttgtgatgtgtgtgttcatctcacattgtttaacctttcttttgattgagcagttttgaaacacgtttttgcagattctgcaagtggatatttggagtgcattgaggcctattgtggaaaaggaaatattttcacacaaaaactacacagaagcattcagagaaacttctttgtgatgagtgcattcaactcacagagttgaaaatctcttttgattgaggaattttgaaactctctttttgtcgaatctgcaagtggatatttggagcactttgaggtctatggttgaaaaggaaatatcttcacataaaaactacacagaagaattctaatgaacttctatgtgatgtgttcattcaactcacagagttcaacctatctgttgatagagctgtttacgaactctctttttgtagaatataaaatggatattttgagtgctttgcagcctatagtggaaaaggaaatatcttcacataaaaattacacagaaacattctgagaaacatcttcgtgatgtatgcattgatctcacagagttgaacatttcctttaattcagcagttttgaaacactctttttgtagaatctacatgtggatatttggagagctgtgagggctattgagaaaaggaaatatcttcacataaaaactacacagaaggattctgagaaacctctttgcgatgtgtgcattcatctcacagaggtgaacatttcttttgatagagtaactttgaaacattcttttttgaataatctgcaagtagatatttggtgcgctttgagccctattgtggaaaaggaaatatcttcacacaaaaactacaaagaagcattcttagaaagtaattggtgatgcgtgcattcaactcacagaggtgaaactatcctttgattgagcagttttgaatctcactttttggaatatctgcaagtggatgtttggagcccttggtggcctatgatggaaaaggaaatatcttcacacaaaaactacacagaagtattctgataaatttctttgtgatgtgtgcattattctaacagagttgaaactttctttgagcagttttgagacaatctttttgtagaatctgcaggtggatatttggagtgctttgaggtctattgtggaaaaggaaatatcttcacataaaagctacacagaagcattctgagaaactcctttgtgaagtgtactttcacttcagagagctgaagctttcttttgattgtgcagttttgaaactctctttttgtagaatcagcaagtggatatttggagccatttgcagcctacggtggaaaacaaaatatctccacataaaaactacacaaaaaaatacagagaaagttctttgtgatgtgtgtattcatctaacagagttgaaagtttcttttgattgagcagtttggaaacactctttttgtagaatctgcaagtggatatttggagcgctttgaggcatattttggaaaaggaaatatcttcacataaaaactacccagaagctttctgagagccatctttgtgatgtgtgcattcatttcacagaattgaaccgttcttttgattgagcagttttgaaacactctttttgtagaatctgcaagtggatatttggagcaccttgcggcctatggtgcaaaaggaaatattttcacataaaaactacacagaagtattctgagaaacttctctgtgatgtgtgcattcatctcagagagttgatactttcttttgatttagcagtttgaaacactctttttgtagaatttgcaagtggatatttggagcgctttgtggcctattgtggaaagggaaaaattttcacataaaaagtgcacagaagcattctgaggaacttctttttgatctgtgcattcatctgaaagagttgaacctttcttttgattgagcagttttgaaacactctttttgtagaatctgcatggggatatatggagcactttgacctactgtggaaaaggaaatatcttcacataaaaactacacagaagcattctgagaaacatctttgggatgtgtacattcaactcacagagttaaacctaccttttgatagagcagaaactctctttttgtagaatctgcaagtggacttttggagcctttggggccaatggtggaaaaggaaatatcttcacataaaaactacacaaaatcattctgagaaacttctttgcaaagtgtgcattcatctcagggaattgaatgtttcttttgattgagcagtttgtaaacactctttttgtagaatctacaaatgtatatttggagcgctttgaggcctattgtggaaagggaaatatcttcacataaaaactacacagaattattctgagaagcttctttgtgatgtgtgcattcatctcacagagttgaaagtttcctttgattgagcagtttggaaacactgttttcgtagaacctgcaagtggatatttggagggccttgaggcgtattgtggaaaaggaaatatcttcacctaaaaactacacagaagcattctgagaaacttctttttgatgtgtgcattcatatcagagaggtgaaactttctttgattgagcagttttgaaactctctttttgtagaatctgcaagtggatatttggaacgctttgaggcatattgtaaaaggaaatatcttcacataaaaacaacaaaaaatcattctgggaggggaggagccaagatggccgaatagtaacagctctggtctacagctcccagcgtgagtgatgcagaagatgggtgatttctgcatttccatctgaggtaatgggttcatatcactagggagtgccagacagtgggtgcaggacagtgggtgcacacactgtgcgcaagccgaagcagggcgaggcattgcctcacttgggaagtgcaaggggtcagggagttccctttctgagtcaaagaaaggggtgacagaagaacctggaaaatcgggtcactcccacctgaatactgggcttttctgaccggtttaaaaaatggcacatcaggagattatatcctgcacctggcttggagggtcctatgcccacggagttttgttaattgctagcacagcagtctgagatcaaactgcaaggtggcagtgaggctgggggaggggcgcccaccattgcccaggcttgcttaggtaaacaaagcagctgggaagctcgaactgggtggagccctccacagctcaaggaggcctgcctgtctctgtaggctccacctctggggacagggaacagacaaacaaaaagacagcagtaacctcggcagacttaaatgtccctgtctgacagctttgaagagagcagtggttctcccaacacacagctgaagatatgagaatgggcagactgcctcctcaagtgggtccctgaccgctgacacccaagcagcctaactgggaggcactgcccagcaggggcacactgacacctcacatggcagggtattccagcagacctgaagctgagggtcctgtctgttaaaaggaaaactaacaaacagaaaggacatccacaccaaaacccatctgtacatcaccgtcatcaaagaccaaaagtagataaaaccacaaagatggggaaaaaacagaacagaaaaactggaaactctaaaaagcagagcgcctctcctcctccaaaggaatgcagttcctcaccagcaacggaacaaagctggatggagaatgactttgacgagttgagagaagaaggcttcagatgatcaaattactctgagctatgggaggacattcaaaccaaaggcaaagaagttgaaaactttgaaaaaaatttagaagaatgtataactagaataaccaatacagaggagtgcttaaaggagcagatggagctgaaaaccaaggcttgagaactatgtgaagaatgcagaagcctcaggagctgatgtgatcaactgcaagaagggtatcagcaatgaaagatgaaatgaatgaaatgaagcgagaagggaagtttagagaaaaaagaataaaaagaaatgagcaaagcctccaagaaatatgcgactatgtgaaaagaccaaatctacgtctgattggtgtacctgaaagtgacggggaggatggaaccaagttggaaaacactctgcaggatattatccaggagaacttctccaatctagcaaggcaggccaacgttcagattaaggaaatacagagaacgacacaaagatactcctcgagaagagcaactccaagacatataactgtcagattcaccaaagttgaaatgaaggaaaaaatgttaagggcagccagagagaaaggtggggctaccctcaaagggaagcccatcagactaacagtggatctctgggcagaaaccctacaagccagaagagagtgggggccaatattcaacattcttaaagaaaagaattttcaacccagaatttcatatccagccaaacgaagcttcgtgagtgaaggagaaataaaataatttacagacaagcaaatgctgagagattttgtcaccaccaggcctgccataaaagagctcctgaaggaagcgctaaacatggaaaggaacaactggtaccagccactgcaaaatcatgccaaaatgtaaagaccatcgagactaggaagaaactgcatcaactaacgagcaaaatcaccaactaacatcataatgacaggatcaaattcacacataacaatattaactttaaatgtaaatggactaaatgctccaattaaaagacacagactggcaaattggataaagagtcaagacccatcagagtgctgtattcaggaaacccatctcacgtgcagagacacacataggctcaaaataaaaggatggaggaagatctaccaagcaaatggaaaacaaaaaaaggcaggggttgcaatcctagtctctgataaaacagactttaaaccaacaaagatcaaaagagacaaagaaggccattacataatggtaaagggatcaattcaaaaagaagagctaactatcctaaatgtatatgcacccaatacaggagcacccagattcataaagcaagtcctgagtgacctacaaagagacttagactcccacacctaaataatgggagactttaacaccccactgtcaacattagacagatcaacgagacagaaagtcaacaaggatacccaggaattgaactcagctctgcaccaagcagacctaatagacatctatggaaaagaacagaaattataacaaattatctctcagaccacagtgcaaacaaactagaactcaggattaagaatatcactcaaaaccgctcaactacatggaaactgaacaacctgctcctgaatgactactgggtacataacgaaatgaaggcagaaataaagatgttctttgaagccaacgagaacaaagacacaacataccagaatatctgggacacattcaaagcagtgtgtagaggaaaatttatagcactaaatgcccacaagaaaaagcaggaaagatccaaaattgacacccgaacaccacaattaaaagaactagaaaaggaagagcaagcacattcaaaagctagcagaaggcaagaaataactaaaatcagagcagaactgaaggaaatagagacacaaaaaacccttcaaaaaattaacgaatccaggagctgtttttttgaaaggatcaacaaaattgatagaccgctagcaagactaataaagaaaaaaagagggaagaatcaaatagatgcaataaaaaatgataaaggggatatgaccaccgatcccacagaaatacaaactaccatcagagaatactacaaacacctctacacaaacaaactagaaaatctagaagaaatggataaattcctcgacacatacactctcccaagactaaaccaggaagaagttgaatctctgaatagaccaataacaggatctgaaattgtggcaataatcaatagcttaccaaccaagaagagtccaggaccagatgtattcacagccgaattctaccagaggtacaaggaggagctggtaccattccttccgaaactattccaatcaatagaaaaagagggaatcctccctaactcattttatgaggccagcatcattctgataccaaagccgggcagagacgccaccaaaaaagagaattttagaccaatatccttcatgaacattgatgcaaaaatcctcaataaaatactggcaaaacgaatccagcagcatatcaaaaagcttatccaccatgatcaagtgggcttcatccttgggatgcaaggctggttcaatatactcaaatcaaaaaatgtaatccagcaattacacagagccaaagacaaaaaccacatgattatctcaatagatgcagaaaaagcctttgacaaaattgaacaacccttcatgctaaaaactctcaacaaattaggtattgatgggacatatttcaaaataataagagctatctatgacaaaaccacagccaatatcatactgaatgggccaaaactggaagcattccctttgaaaactggcacaagacagggatgccttctctcaccactcctattcaacatagtgttggaagttctggccagggcaattaggcagaagaaggaaataaagggtattcaattaggaaaagaagaagtcaaattgtccctgtttgcagacgacatgattgtatatctagaaaaccccattgactcagcccaaaatctccttaagctgataagcaacttcagcaaagtctcaggatacaaaatcaatgtacaaaaatcacaagctttcttatacaccaacaacagacaaacagagagccaaatcatgagtgaactcccattcacaattgcttcaaagagaataaaatacctaggaattcaagttacaagggatgtgaaggacctcttcaaggagaactacaaaccgctgctcaatgaaatgaaagaggatacaaacaaatggaagaacattccatgctcacggataggaggaatcaatatcgtgaaaatggccatactgatcaaggtaatttatagattcaatgccatccccatcaagctaccaatgcctttcttcacagaattggaaaaaactactttaaagttcatatggaaccaaaaaagagcccacatagccacgtcaatcctaaggcaaaagaacaaagctggaggcatcacactacctgacttcaaactatactacaaggctacagtaaccaaaacagcatggtactggtaccaaaacacagatatagatcaatggaacagaacagaaccctcagaaataatgccgcatatctacaactatctgatctttgacaaacctgagaaaaacaagcaatggggaaaggattccctgtttaataaatggtgctgggaaaactggctagccatatgtagaaagctgaaactggatcccttccttacatcttatacaaaaatcaattcaagatggattaaagacttaaacgttagacctaaaaccataaaaaccctagaagaaaacctaggcgataccattcaggacataggcatgggcaaggacttcatgtctaaaacaccaaaaacaatggcaacaaaagacaaaattgacaaatgggatctaattaaactaaagagcttctgcacagcaaaaaaaaaactaccatcagagtgaacaggcaccctacaaaatgggagaaaattttcgcaacctactcatctgaaaaagggctaatatccagaatctacaatgaactcaaacaaatttacaagaaaaaaacaaacaaccccatccaaaagtgggcaaagaacatgaacagacacttctcaaaagaagacatttatgcagccaaaaaacacatgaaaaaatgctcatcatcactggccatcagagaaatgcaaatcaatccacaatgagataccatctcacaccagttagaatggcaatcattaaaaagtcaggaaagaacaggtgctggagaggatgtggagaaataggaacacttttacactgttggtgggactgtcaactagttcaaccattgtggaagtcagtgtggcgattcctcagggatctagaactagaaataccacgtgtcccagccatcccattactggatatgtactgaaaggactataaatcatgctgctatagagacacatgcacacgtatgtttactgaggcattattcacaataggaaagacttggaaccaacccaaatgtccaacaatgatagactggattgagaaaatgtggcccatatacaccatggaatactatgcagccataaaaatgatgagttcatgtcctttgtagggacatggatgaaattggaaatcatcattctcagtaaactatcgcaagaacaaaaaaccaaacaccgcatattctcactcataggtgggaattgaacaatgagatcacatggacacaggaaggttactatcacactctggggactgttgtggggtgggggcggggggaggggtagcattgggagatatacctaatgctagatgacgagttagtggttgcagcgcaccagcatgacacacatgtatacatatgtaactaacttgcacaatgtgcacatgtaccctaaaacttaaagtataataaaaaaaaaatcattctgaggaacttctttgtgatgtgtgcattcatatcagagaattgaacgtttcttttgattgagcagtttggaaatactctttttgtccaaactacaggtggatatttggatcgctttgaggcctattgtggaaagggaaatatcttcacataaaaactacacagaagatttctgagaaacttatttgctatgtgtgcattcaactctcagtgttgaacctatctttgaatgagcagttttgaaactccctttttggaaaatctgcaaatcgatatttggacccatttgcagcttatggtggaaaaggaaatatcttcaattaaaaactacaccgaagcattcttagaaaattctttgtggtgtgtgcattcatgtcacagagttgaaactttcttttgatagagcagttttgaaacactctttttgtagaaactacaggtggatatttggagcgctttgaggcctattgtggaaagggaaatatcttcacataaaaactacacagaagcattctgagaacgttctttgtgatgtgtgccttcaactctcagtgttgaacctatctttgattgagcagttttgaaactccctttctggaaaatctgcaaatggatacttggagccgtttgcagcctatggtggaaaaggaaatatattcaaataaaaactacacagaagcattctgagaaaattctttgtggtgtgtgcattcatgtcacagagttgaaactttcttttgattgagcagttttgaaatattctttttgtagagtctgcatgtggatatttggagtgctttgaggccaatggtggaaaaggaaatatcttcacagaaaaaatacgcagaataattctgagaaattacttagtgatgtgtgcatacatctcacagagttgaaaccttcttttgattgagcagttttgaaacactctttttattgaatctgcaagtggatatttggagtgctttgaggcctatggtggaaaaggaaatatcttcacataaaaactactcaaaaacattctgagaaacttctttgtgatatgtgcatttatctcacagagttgaggatttcttttgattgagcggtttggaaacttctttttgaagaatctgcaagtggatatttggagcgctttgagtcctatcgtggaaaaggtaatatcttcacataaaaagtacatagaagcattctgtgaaacttgtttttgatgtgtgcattgcactcacgtaggtgaacctatcttttcattgagcagttttgaaacactctttttgtggattccacaagtggatgtttggagcgttttgaaggttaagctggaaaaggaactatcttcacataaaaactatacagaagctttctgagaaacttctttgtgatgtgtgcaatcaactcacagatttaaacccatcttctgattgagcagttttgaaagtctctttttgtagaatctgcaagtggatatttggaaccgtttgtggcctatgggggaaaaggaaatatcttcacataaaaactacacagaagcattttgaaaaacttctttgtgatgtgtgcattcatctcacatagttgaaccttatttttgattgaacagttttgaaacttctttttgttgaatctgcaagtggatatttggagctatttgtggcctatggttgaaaaggatatatgttcacataaaagctatagagaagaattctgagaaacttctttgtgacgtgtgcagtcaactcacagagttgaacctatcttttgaaagagcagtttgaaacactctttttgtagaatctgcaagtggatatttggagccttttgcatcctatagtggaaaaggaaatattttcacatagaaactacacagaatcattctgagaaacttctttgtgatgtgtgcattcatctcacagagctgaacctttcttttgattgagcagttttgaaacactctttttgtagattctgtaagtagatatttggagtgctttgaagcctattgtggaaaaggaaatatcttcacataaacactacaaagaggcatgctgagaaacttctttgcgatgtgagcattcatctcacagaggtgatcctttcttttgtttgagcagtggggaaactctctttttttagaatctgcaagtggatatttggagcgctttgaggcctattcaggaaaagggaacatcttcacacaaaaactacaaagaaacattctgagaaactactttgtgatgtgtgcattcatctcacagagttgaacttttcttttgattgagcagttttgaaaatctctttttatggaatctgcaagtggatatttggagtgctttgaggcgaattgtggaaaaggaaatatgttcacataaacactacacagaagcattctgagaaacgtcttcgtgacatgggccttcatctcagagagttgaacctttcttttgattgagcagttttgaaactctctttttgtagagtctacaagtggatatttggagacatttgtggcctatggtggaaaaggaaatatcttcacataacaactacacagaagcattctgggaaacttcattttgatgtgtgcaatcaactcacagatttgaaattatcttttaattgagcagtttgaaactctctttttgtagaatctgcaagtggatatgtggagccatttgcagtctatggtggaaaaggaaatatcttcacatagaaactacacagaagcattgtgagaaactactttgtgttgtgtgtaatctactcacagagttgaacatatcttttgattgagcagctttgaaactctctttttgtagaatctgtaagtggatatttggagccttttgtggcctatggtggaaaaggaaatatctacaaattaaaactacacagaagcattctgagaaacttctttgtgatgtgagcattcatctcacagagttgaatctttcttttgattgagcagtttgaaaatgctctttttgtagaatctgcaagtggatatttggagtgccttgaggcctattgtggaaaagggaaacatcttcacataaaaactacacagaagtaatctgataaacttctttgtgatgtgtgcattcatctcacagagttgaacctttatttttattgagcagtttggaagaactctttttgtacattctgcaagtagatattctttgtgatgtgtgcattcaactcacagagttgaaagtatcttttgattgagtagttttgaaacagtctttttgtagaatctgcaagtggatatttggagtgctttgaggcctgtggtggaaaacgaaatatcttctcatcaaaaatacacagaagcatattgagaaaattcttgtgatgtgtgcattcatctcacagagttgaatctttcttttgattgagcaattttgaaacactcgttttgtagaatctgcaagtggatatttggagcgccttgaggcctgttgtggaaaagggaaacatcttcacataaaaactacacagaagtaatctgagaaacttctttgtgatgtgtgcattcatctcacagagttgaatctttattttgattgagcagtttggaagaacttttttgtacattctgcaagtggatatttggagtgctttgaggcctattctggaaaaggaaatatcttcacacaaaaactacacagaagcattctgagaaacttctctgtgatgtgtgcattcaactcacagagttgaaagtgtcttttgattgagtagttttgaaacagtctttttgtagaatctgcaagtggatatttggagtgctttgaggcctatggtggaaaaggaaatatcttctcatcaaaaatacacagaagcgtactgagaaaattcttgtgatgtgtgcattcatctcacagagttgaatctttcttaagattgagcaattttgaaacactcgttttgcagaatctgcaagtggatatttggagcgctttgaggcctattttggaaaaggaaatgtcttcacatagaaactacacagatgcattctgagaaacttctttgcaaagtgtgcgttcatctcagagagttgaagctttcttttgattgagtcgttctgaaactctctgtatgtcgaatctgcaagtggatatgtggagccttttgtgggctatggtgcaaatgaaaatatcttcacatgaaagctacaaagaagcattgtgacaaaattctttgtgatatgtgtattcacctcacagagttgaacacttcttttgattgagcagtttgaaaacactcttttgtagaatctgcaagttgatatttagagagctttgaggcctattttggaaaacgaattatcttcacataaaaactacacagaagaattctgagaaacttctttgtgatgtgtgcattcatctcacagagttgaaccttccttttgattgagcagttttgaaacactctttttgtagaatcttcaactgtatatttggagagctttgaagcctctggtggaaaaggaaatatcttacaataaaaacaacacagaagcattctgatgaacttctttgtgatgtcttcattcatctcacagagttgaaaatttcttttgattcagtagttttgaaacactccttttgtagaatctgcaagtggatatttggagttctttggggcctattgtggaaaacgaaatatcttcacataaaaactatacagaagcattctgagaaacttctttgtgatgagtgtattcaactcaccgagttgaacctatcttttgatggaacagttctgcacctctctttttgtagaatctgaaagtggatattttgagccctttgcggcatatggtggaaaaggaaatatctactcataaaaactacacaaaagaaatctgagaaatttctttgggttgtttgcattcatctcacagagttgaaactttcttttgtttgagaagtttgtaaacactaatttgtagaatctgaaagtggatatttggagtgctttggggcctactgtggaaaaggaaatatcttcacctaaaaactacatagacgcattctgagaaacttctttgtgatgtgtggattcatcttactgagttgatccattcttttgattaagcagtttgaaaacactctttttgtagaatctgcaaatggatattttcggttctttgatgtctatggtggaaaaggaaatatcttcacataaaaaatacacagaagcattctgggaaacttcattgtgatgtgtgcattcaactaacagagttgaacgtatcttttgattgagaagttttgaaactcactttttatacaatctgcaattggatatttggagacctttgcggcctatgttggaaaaggaaatatcttcacataaaaactgcacagaagctttctgagaaacttctttgtgatgtgtgcattcaactcacagacttgtacctatcttttgattgagcaattttgaatctctctctttgtagaatctgcaagtggatatttggagccccttgcggtctacggtggaaaaggaaatatcttcatataaaaaatacacagaagcattctgagaaaattctttgtgatcagtgcattcttctcacagagttgagcttttctttctattgagtattttgaaaaactctttttgtacagtcagcaagtggataattgtagtgctttgaggtctattgtggaaaaggaaatatcttcacataaagactacacagaaacagtctgagaaacttctttgtgatttgtgttttcatgtcatagagttgaaactttcttttgattgagcagtttggaaacactctttttgtataatctgcaagtgaatgtttggagtgcattgaggcctatggtgtaaaaggaaatatcttcacataaaaattacacagaagctatctgagaaatttctttgtgatgtgtgtattcatctcacagagttgaattttttttttcttttattattatactttaagttttagggtacatgtgcacactgtggagattagttacatatgtatacatgtgccatgctcgtgcactgcacccactaactcgtcatctagcattaggtatatcttccaatactatccctcccccctacccccaccccacaacagtccccagagtgtgatgttccccttcctgtgtccatgtgatctcattgttcaattctcacctatgagtgagaatatgcggtgtttggtttcttgttcttgcgatagtttactgagaatgatgatttccaatttcatctatgtccctacaaaggacatgaactcatcactttttatggctgcatagtattccatggtgtatatgggccacattttcttaatccagtctatcattgttggacatttgggttggttccaagtctttgctattgtgaatagtgctgcaataaacatacgtgtgcatgtgtctttatagcagcatgatttatagtcttttgggtatatacccagtaatgggatggctgggtcaaatggtatttctagttctagatccctgaggaatcgccacactgacttccacaatggttgaactagtttacagtcccaccaacagtgtaaaagtgtttctatttctccacatcctctccagcacctgttgtttcctgactttttaatgatcaccattctaactggtgtgagatggtatctcattgtggttttgatttgcatttctctgatggccagtgatgatgagcattttttcatgtgttttttggctgcataaatgtcttcttttgagaagtgtctattcatgtcctttgcccacttttggatggggttgtttgtttttttcttgtaaatctgtttgagttcattgtagattctggatattagccctttgtccgatgagtaggttgcaaaaattttctcccatgttgtaggttgcctgttcactctgatggtagtttcttttactctacagaagctctttagtttaattagatcccatttgtcaattttgtcttttgttgccattgcttttggtgttttagacatgaagtccttgcccatgcctatgtcctgaatggtattgcctaggttttcttctagggtttttatggttttaggtctaatgtttaagtctttaatccatcttgaattgatttttgtataagatgtaaggaaaggatctagtttcagctttctacatatggctagccagtttccccagcaccatttattaaatagggaatcctttccccattgcttgtttttctcaggtttgtcaaagatcagatagttgtagatatgtggtgttatttctgagggctctgttctcttccattgatctgtatctctgttttggtaccagtaccatgctgttttggatactgtagccttgtagtatagtttgaagtcaggtagtgtgatgcctccagctttgttcttttggcttaggattgacttggcgatgtgggctcttttttggttccatatagactttaaagtagttttttccaattctgtgaagaatggcattggtagcttgatggggatggcattgaatctgtaaattaccttgggcagtatggccattttcacgatattgattcttcctacccatgagcatggaatgttcttccatttgtttgtatcctcttttatttcattgagcagtggtttgtagttctccttgaagaggtccttcacatccctggttattgggattcctaagtattttattctctttgaagaaattgtgaatgggatttcactcatgatttggctctctgtttgtctgttgtcagtgtataagaatgcttgtgatttttgtacattgattttgtatcctgagactttgctgaagttgcttatcagcttaaggagattttgggctgagtcaatggggttttctagatatacaatcatgtcgcctgcaaacagggacaatttgacttcctcttttcctaattgaataccctttatttccttctcctgcctaattgccctggccagaacttccaacactatgttgaataggagtggtgagagagggcatccctgtcttgtgccagttttcaaagggaatgcttccagttttggcccattcagtatgatattggctgtgggtttgtcataattagctcttattattttgagatatgtcccatcaatacctaatttattgagagtttttagcatgaaatgttgttgaattgtgtcaaaggccttttctgcatctattgagataattatttagtttttgtctttggttgtttatatgctggattacatttattgatttgcatatattgaaccagccttgcatcccagggatgaagcccacttgatcatggtggatgagctttttgatgtgttgctggattcggtttgccagtattttattgaggatttttgcatcaatgttcatcaaggatattggtctaaaattctcttttttcattgtgtctctgcctggctttggtatcagaatgatgctggcctcataaaatgagttagggaggattccctctttttctattgattggaatagtttcagaaggaatggtaccagctcctccttgtacctctggtagaattcggctgtgaatccatctggtcctggactctttttggttggtaagctattgattattgccacaatttcagatcctgttattggtctattcagagattcaacttcttcctggtttagtcttgggagagtgtatgtgtcgaggaatttatccatttcttctagattttctagtttatttgtgtagaggtgtttttagtattctctgatggtagtttgtatttctgtgggattggtggtgatatcccctttatcagtttttattgcatctatttgattcttccctctttttttctttattagtcttgctagcagtctatcaattttgttgatcctttcaaaaaaccagctcctggattcattaattttttgaagggtttttttgtgtctctatttccttcagttctgctctgattttagttatttcttgccttctgctaccttttgaatgtgtttgctcttgcttttctagttcttttaattgtggtgttagggtgtcaattttggatctttcctgctttttcttgtgggcatttagtgctataaatttacctctacacactgctttgaatgtgtcccagagattctggtatgttgtgtctttgttctcgttggtttcaaagaacatctttatttctgccttcatttcgttatgtacccagtagtcattcaggagcaggttgttcagtttccatgtagttgagcggttttgagtgagattcttaatcctgagttctagtttgattgcactgtggtctgagagatagtttgttataatttcttttcttttccatttgctgaggagagctttacttccaagtatgtggtcaattttggaataggtgtggtgtggtgctgaaaaaaatgtatattctgttgatttggggtggagagttttgtagatttctattaggtctgcttggtgcagagctgagttcaattcctgggtatccttgttgactttctgtctcgttgatctgtctaatgttgacagtggggtgttaaagtctcccattattaaggtgtgggagtctaagcctctttgtaagtcactcaggacttgctttatgaatctgggtgctcctgtattgggtgcatatatatttaggatagttagctcttctttttgaattgatccctttaccattatgtaatggccttctttgtctcttttgatctttgttggtttaaagtctgttttatcagagactaggattgcaacccctgcctttttttgttttccatttgcttggtagatcttcttccatccttttattttgagcctatgtgtgtctctgcatgtgagatgggtttcctgaatacagcaccctgatctgtcttgactctttatccaatttgccagtctgtgtcttttaattggagcatttagtccatttacatttaaagttaattttattatgtatgaatttgatcctgttatgatgatgttagctggttattttgctcattagttgatgcagtttcttcctagtcttgatggtctttacattttggcatgattttgcagcggctggtgctggttgttcctttccatgtttagcgcttccttcaggagctcttttatggcagacctggtggtgacaaaatctctcagcatttgcttgtctgtaaaggattttatttctccttcagttatgatgcttagtttggttgggtatgaaattatggtttgaaaattcttttctttaagaatgttgaatatttgtccccactctcttcaggcttgtagggtttctgccgagagatctgctgttagtctgattggcttccctttgagcataacccgacttttctctctggctgcccttaacattttttcgttatttcaactttggtgaatctgacaattgtgtgtcttggagttgctcttctcgatgagtatctttgtggtgttctctgtatttccttaatctgaacgttggcctgccttgctagattggggcagttctcctggatagtatcttgcagagtgttttccaacttgattccattctccccgtcactttcaggtacaccaatcagacgtagatttggtcttttcacatagtcccatatttcttggaggctttgctcatttctttttattcttttttctctaaacttcccttctcacttcatttcattcatttcattttccattgctggtaccctttcttccagttgatcacatcggctcctgaggcttctgcattcttgacgtagttcttgagcattggttttcagctccatcagctcctttaagtacttctctgtattggttattctagttttacattcttctaaatttttttcaaagttttcaacttctttgcctttggtttgaatgtcctcccatagctcagagtaatttgatcttctgaagccttcttctttcagctcttcaaagtcgttctccgtccagctttgttccgttgctggtgaggaactgcattcctttgaaggaggagaggcgctctcagagttgaatttttcttttgactgtggagtttggaaacactctgtttgtagaatctgcaaggggatatttggagacctttgttgccttttgtggaaaaggaatatcttcagataaaaactacacagaagcattctgatgaatttctttgtgatgtgtgcattcatctcacagagttgaactttgtttggactcagtagttttgaaacactctttatgtagaatctgcaagtggatatttgtagcgctttgggtccttttgtggaaaaggaaatatcttcacctaaaaactacacagaagcattctgagaaacttctttgtgatgtgtgcattcttctcatggagctaaacctttctttttattgagcaatttggaaacactctttttgtagaatctgcaagtggtcactttgagcactttcaggcctatggtggaaaagaaaatatcttcacatataaactacacagaaacattctgagaatcttctttgtgatgtgtgtattaaactcacagagttgaacctatcttttgatggagcagttttgaaactctctttttgtagaatctggaagtggatattggggagctttgaggtctattgtggaaagggaaatatcttcacataaaacctacacagaagcatattgagaaaattcttgtgatgtgtgcattcacctcacagagttgaacctttcttttgattgaatacttttgaatcactcgttttgtagaatctgcaagtggatgtttggagagctttgaggaaaaggaaatatcttcacataaaaactacacagaccattctgagaaacttctttgccatgtgtgcattcatttcacaaagtgaacttttcttttgatactgcagtttttcagcactctttttgtagaatctgcaagtagatatttggagcaccttgaggcctctagtggaaaaggaaatatcctcacataaaaattacacagaagtattctgagaaacttctttgtgatgtttactttcatgtcacagatttgaacctgactttggattgaacagttttgaaacactctttttgtagaatctgcaagaggatggatggagcgctttgaggaaatggtggaaaacgaaatatcttcacataaaaactacacagaagtattcagagaaacttctttgttatgtgtgcattcatttcacaaatttaaacctttcttttgatagagcagttttgaaactctctttttgtagaatctaaggtgaatatttgaagccctttgcagccaacggtggaaaaggaaatatcttcacatgaaaactacacagagtcattctcagaaacttctttgtgatgtgtgaattcatctcacagagttgaagctttcttttgattgagcagttttgaaaaacatcttttgtagaatctgcaaatggatatttggagcgccttgaggcctattttggaaaaagaaatatatacacataaaaactacacagaagcattctgataaacttctttgtgatgtgtgcattcatctgactgagttgaagctttcttttgattgagcagtttggaaacactctttttgaagaatctgctagtggatatttggagtggtttcaggccaatggtggaaaaggcaatatcttcacataaaaactacacagaagaattctgagaaacttcttttggatgtgtgcattcaactcacagatttgaacctatcttttgattgagcagttttgaacctctctttttgtagaatctgcaagtggggatttggatccctttgtggccaatgatggaaaaggaaatatcttcacataaaaactttgcagaagtattctgagaaacttatttgcaatgtcttcattcatctcgtaaggttaaacctttcctttgattcagcagttttgaaacattctttttgtaaaatctgcaagtggatatttggggtgctttgaggtttattgtggaaaaggatatatcttcatataaaacctacacagaagcgttctgagaaacttctttgtgatctgtgcattcatctcacagaattgaacctttcttttgattgagtagttttgaaacactctttttgtaacttctgcaagtggatatttggagctatttgaggcctattgtggaaaaggaaatattttcacatagaaactacacagaagcattctgagaaacttctttgtgatgtgtgcattcatctcacagagttgaacctttttttttttgttcagcaattttgaaacactctttttgtagaatctgctagtggatatttggagctcgttgaggcctattgtgaaaaagtaaatatcttcacataaaaactatgtggaagttttctgacacatttctttgtgatgtgtaaattcaactcacaagttgacctatctgttgtttgagcagttctgaaactcttttagtagaatctgcaaatggatatttggagccctttgtggcctatggtggaaaaggaaatatcttcacataaaaactacccagaagcattctgagacacttctttgtgatgtgtgcattcaactcgcagacttgaacgtatcttttgattcagcagttttgtatctctctttttgtagaatctgcaagtggatattttgtgtccttcgtggcctactgtggaaaaggaaatatcttcacataaaaactacacataagcattctgagaaacttctttgtgatgtgtgcattcatctcatagagttgaacatgtcttttttttttacattttaatttttaaaaatttatttatttttttcttttattattattatactttaagtttagggtacatgtgcacaatgtgcagggtagttacatgtgtatacatgtgccatactggtgtgctgcacccattaactcttcatttagcattaggtatatctcctaaagctatccctccctcctccccccaccccacaacagtcccacgagtatgatgatccccttcttgtgtccatgttttctcattgttcaattctcacctatgagtgagaatatgcaatgtttggttttttgctcttgccatagtttactgagatgatgagttccaatttcatccatgtccctacaaaggacatgaactcatcattttttatggctgcatagtattccatggtgtatatgggccacattttcttaatccagtctatcattgttggacatttgggttggttccaagtctttgctactgtgaataatgccgcaataaacatacgtgtgcatgtgtctttatagcagcatgatttatagtcctttgggtatatacccagtaatgggatggctgggacacatggtatttctagttctagatccctgaggaatcgccacactgacttccacaatggttgaactagttgacagtcccaccaacagtgtaaaagtgttcctatttctccacatcctctccagtacctgttgtttcctgacattttaatgatcgccattctaactggtgtgagatggtatctcattgtggttttgatttgcatttctctgatggccagtgatgatgagcattttttcatgtgttttttggctgcataaatgtcttcttttgagaagtgtctgttcatgtcctttgcccacttttggatggggttgtttgtttttttcttgtaaatttgtttgagttcattgtagattctggatattagccctttgtcagatgagaaggttatgaaaactttctcccattttgtaggttgcctgttcactctgatggtagtttcttttgctgtgcagaagctctttagtttcattagatcccgtttgtcaattttgggttttgtttccattgcttttggtgtttagacaagaagtccttgcccatgcctgtgtcctgaatagtaatgtctaggttttcttctagggtttcatggttttaggtctaacgtttaagtctttaatccatcttgaattaatttgagcagttttgaaacaatcttttagtagcatctgcaagtggatatttggagtgctttgaggcctattgcggaaaaggaaatatcttcacatgaaaactacacagaagcattctgagaaacttctatgtgatgtgtgcattcatcccatggtgttgaattttcttttgattgagcagttttgaaacactcttcttgtagaatctgcaaggtgatatttggagcccttcgaggcctatggtggaaaaggaaatatcttcacctaaaacctacacagaagcattctgagaatatacttggtgatgttggcattcacctcacagtgttgaacctatcttttgactgagcagttttgaatccgtctttttgtagaatcttcaggtgtatatttggagccctttgcgacctattgtggaaaaggaaatgtcttcacataaaaactacacagaagcattctgagaaacttctttgtgatgtgtgctttcatcacacagagttgaaagtttcttttgattgagcagtgtgaagcactctttttgtagaatttgcaagtagatatttttagtactttgacacatattgtggaaagggaaatatcttcacatgaaaactacacagaagcattctgagaaacttcattgtaatgtgtgcattcatttcacagagttgaacttttcttttgatagagcagtttggaaacactctttttgcagaatctacaagtgtacatttggagcgctttgaggcttatggtggaaaaggacatatcttcacataaaaactacacagaagcattctgagaaacttctttgtgatgtgtgtattcaactcacagagtggaacatatgttttgatagagcagttttgaaactctctttttggagaatctgcaagtggatatttggagcccattgtggcctatggtgttaaaggaaacgttctcacataaaaactgcacagaagcattctgagaaacttctttgtgaggtgtgcagtcatctccactgttgaacctttcttttgattgagcagttttgaaacatttttttgtgatatttgcaagtggatatttggatcactatgaggcctatagtggaaaaggaaatatcttcaccaaaaaactacacagaagcattctgagacacttcctagtgatttgtgcatttatctcacagagttgaaactttcttttgaatgagcagttttgaaactctctttttgtagaatcttcaagtgcctgtttggagtgctttcaggcctatggtggaaaaggaaatgtcttcacataaaaattacacaggagaattctgagaaacttctttgtgatgtgtgcattcaactcacagagttgaacctatttttgagagagaagctttgaaactctctttttgtagaatctgcaagtggatatttggagcccttggaggcctatggtggaaaacgaaatgtcttcacataaaaactacacagaagcattctgagaaacttctttgtgatgtgtgcattcatctcacagaattgaacctttcttttgattgagcagttggaaacactctttttgtacaatctgcaagtcagtatttggagtgccttgtggcctgtggtggaaaaggaaatatcttcacataaaaactacacagaggcattctcagaatcttctttgtgatgtgaacattcaactaacagatttgaccttctctttcaattgagcagttttgcatctctctttctgtataatctgtaagtgggtaattggagccttttgtggcctgttttggaaaaggaaaaatcttcacatgaaaactacacagaagcattctttgaaactgctttgtagtgtgtgcattcatctcacagaattgaacaattcttttgattgggcagttttgaaacacactttttatggaatctgcaagtggatatttgaagcgcttagaagcctattatggaaaaggaaatatcttcacattgaaactacacagaagcattcagagaaacttctttgggatgtgtgcattcagctcacagagttgaacctatctttttagagagaagttttgaaactctctttttgtagaatctgcaagtgcatatttggaactctttgaggcctatggtggaaaaggaaatatcttcacataaaaactacacagaagcattctgagaaacttctttgtgatttgtgcattcaactcacagagttgacctatctttttagagagaagctttgaaactctctttttgtagaatctgcaagtggatatttggagccatttgaggcctatggtggaaaaggaaatatcttcatataaaaactagacagaagcattctcagaaacttctttgtgatgtgtgcattcatctcacagagttgaacctttcttttgattgagcagttggaaacactctttttgtacaatctgcaagtcagtttttagagcgccttgaggcctatggcggagaaggaaatatcttcacataaaaactacacagaagcattctcagaatcttctttgtgatgtgagcattcaactcacagagtagagcctctgttttcattgagcagttttgaatctctctttctgtataatctgtaagtggatatttggagccctttctggcctgttttggaaaaagaaatatcttcacacaaaaactacacagaagcattctgagaaacttctttgtaatgtgtgcattcatctcacagagttgaatatttcttttgattgggcagttttgaaacacactttttatggaatctgcaagtggatatttgaagcgcttggaagcctattatggaaaaggaaatatcttcacattaaaaggacacagaagcattcagagaaacttctttgggatatgtgcattcatctcagagagttgaacctttcttttgattgtacagttaaaaacactctttttgtagaatctgcaagtgaacatttggagtgctttgtggcctgaggtggaaaaggcaatatcttcacataaaaactttatagaagcattctgagaaacttttttgatttgtgcattcatctaacagaagtgaagctttcttttgatggacctggtttgaaatactctttttgtggaatctgcaagtggacatttggaacactttgaggcctatggtggaaaaggaaatatgttcacataaaaactacacagaagaattctgagaaacttatctgcgatgtgtgcattcatttcgcagatttcaacgtttattttgattgagcagttaggaaacactctttttgtagaatctgcaaatggacatttggagcgctttgtggattatgttagaaaacgaaatatattcacatgaaaactagacaaaaaaattctgagaaacttcttggtgatgtatgcgttcatctcacagagttggacctttcttttgattgagctgtttggaaacactcttttgtggaatctgcaaatggatatttggagcgctttgctgcctatgatagaaaagcaaatatcttcacataatatctagacagaagcaatctgagaaacttatttgcgatgtgtccattcaagtcaccgagttaaaccgttcttttgattgagcagttttgaaactctttttgtaaaatctgcaactggacatttggagcgctttaaggcctatgttggaaaaggaaatatcttcatataaaaactagacagaataattctgagaaacttctttagaatgtgtgtgttcatctcacagagttatacctttctttttattaagcagttttgaaactctctttttgtagaatctgcaagtggacatttggagcgctctgtggtctatggtagaaaaggaaatatcttcacataaaatctagacagaagcaatctgagaaacttctttgtgatgtgtgcattcatctcacagagttaaacgtttcttttgattgagcagttttgaaactctgtttttgtagtatctgcaagtggacatttggagcgctttgaggcctatggtggaaaaggaaatatcttcacataaaaactagacagaagaattctgagaaacttccttgtgatgtgtgcgttcatctcacagagttgaacctttcttttggttgagcagtttggaaacactccttttgtagaatctgcaagtggacatttggatcactttgcagcctatgtttgagaaggaaatatcttcacaacaaaacaagacggaagaattctgagaaacttctttgtgatgtgtgcattaatcccacagagttgaatgtttgttttcattgagcagtttggaaacaatctttttgtagaatctgtaagtggaaatttggagcgcattgcggcctattgtagaaaaggaaatatcttcacataaaatctagacagaagaaatttgagaaactcctttgtgatgtgtgtgttcatctcacagagttgaatctttctttttattgagcagtttggaaacactctttttgtagaatctgcaagtggacatttggagcactttgaggcatatggtggaaaaggaaatatgttcacataaaaattagacagacgaattctgagaaactactttttgatatgcgttcatctcacacagttgaacctttcttttgattgagtagtttggaaacactctttttgtagaatctgcaagtggacatttggagtgctttgcggcctatggtagaaaaggaaataccttcacataaaatctagacagaagcaatctgagaaatttctttcttatgtgtgctttcatctcacagagttgaacttttcttttgattgagcagtttggaaaaactctttttgtgcaatctgcaactggacatttggagcgctttgcagcctaagttagaaaatgaaatatcttcacataaaaactagacagaagaattctgagaaacttccttgtaatgtgtgcgtttatctcacagagttgaacctttcttttgattcaggtgtttggaaactctctttttgtagaatctgcatttggacatttggagccctttttggcctatggtagaaaaggaagtatcctcacataatatctagacagaagttatctaagaaacttctttttgatgtgtgcattcttctcaccaagttaaacctttctattgattgagcagttttgaaactctctttttgtagaatgtggaagtagacatttggagcactttgagacctctggtggaaaagggaatatcttcacataaaaagaagatagaagaattctgagaaacttccttctgatgtgtgcgttcatctcacagagtcgaacaattgttttgattgagcagtttggaaacactctttttgtagaatctgcaagtggacatttggagtgctttgtagcctacggcagaaaaggtaatgtcttcacatgaaatctagacagaagaaatctgagaaaatactttttgatgtgtgtgttcatctcacagacttgaatcttttttttgattgagcagtttggaaatactctgttttctagaatctgcaagtggacatttggaacgctttgcggcttaaggtagaaaaggaaatatcttcaaataaaatctagacagaatcaatctgaggaacttctttgtgatgtgtgcattcgtcccacagagttaaacctttcttttgattgagaagttttgagactctttttgtagtacctggaagtggacatttcgaaggccttgaggcctatggtggaaaaggaaatatcttctcataaaaactagactgaagtattctgtaaaactcctttgtgatgtttgcattcaactcagaaagttgaacttctctttatatagtccagttttcaaacactatttttgtagaatctgcaagtggatactgggactgctttgaggccttcgttggaaacgggattatcttcacatagaaactagactgaaggattcttagaaacttctttgtgatgtgtgcattcaactcaccgagtggaacctcacttttgatagagcagtgttgaaagacacttgttgtagaatctgcaggtggatatttggagtgctttgaagccttccttggaaacgggaatatcttcacataaaaactagacataagcattctcagaaactcctttgtgatctgtccattcagctcacagagttgaaccttccttttgatagagcagttttgaaacactctttctgtagagtctgcaagtggatatcaggagcgctttgaggcctatggtagaaaaagaaatatctgcatataaaaactagacagaagcattctgagaaacttctttgtgatgtttgcattcaactaccagagttgaaccttccttttgatagagcagttttgaaacactctttgtgtagaatctgcatgtggatatctggagcgatttgaggcctatggtcaaaaaggaaatatcttcctatgaaaaacagacaaaagcattctcagaaactacttagagatatgtgcattcaactcacagagttgaaacttttttttgatagagcagttttgaaacactctgtagaatctgaaagtggatatttggagctatttgagggctatggtggaaaagaaaatatattcccattaaactagacagaagcatcctcagaaacttctttatgatgtttgcattaaactcacagagttgaacatacctttccatagagcagttttgaaacactctttttggggaatccgcaagtggatatttggaccgctttgagacctttgctggaaatgggaatatcttcacatataaactagacagaagcattctcggaaacttcttcgtgatgtgtgcattctgctcccaaagttgaaccttccttttcataaagcagttttgaaacactcttttgtacaatctaccattggatatgtggaaggctttgatgcccatggtagaaatggaaacatcctcatataaaatctagacagaaggattcacagaaactgctgtgtgatgtgtgcatccaaatcacggagttgaacttttcttttgttagagcagttttgaaaccctgtttccgtggaatctgccagtggacatttggagcgcattgagggctatggtggagaaggaaatatcttcacataaaaactagaaagaagcattctcagaaacatctatgtgaagtatgcattcaactcacagagttgaaccttccttttgatagaagagttttgaaacactcttttgtacaattgcaggtgaatatttggagcgctttgaagcctttgttggaaatgggaatatcctcacattaaaaactagccagaagcattctcagaaacttctttgtgatgtgtgcattgaacccagagagatgaaccgttcctttgagagagcagttttgaaacgtgtttttgtaagatctgcaagtggatatttggggcgctttgagtccttaggtggaaacgggaatatcttcgaataaaaactagacagaattattctcagaatcttctttgtgatgtgggcattcaactaacacagttgaacatttcttttgacagagcagttctgaaacactctttttgtagaatccgccagtggatatttggagcgctttgagggctattgtgcaaatggaaatatcttcacctaaaaactagaccgaagcaatcccagaaactactttgtgatgtttgcattcaactcacagagttgaacctacctcttcatagggcagtttggaaaacctctttttgtagaatctgcaagtggatatttggaccactttgaggccttcataggaaacagtactatcttcacataaaaactaggtagaagcattctcagaaacttctttgtgatgtgtgaattcaactcacagagttgaaccttcctttaatagagcagttttgaaacactctttttgtagaatttgccagtagatatttggagcgctttgaggccttcgttggaaaccggaatatcttcacataaaaagtagatagagccattctcagaaacttttttgtgatatgtagattcaactcacagcgttgaacctttcttttgatagagcagttttgaaaaactcttttatcgaatctgcaagtagacatttggagtgctttgagggctgtggtcgaaaaggaaatatcttcacatagaaactagactgaagcattctcagcaacttctttgtgacgtttgcattcatctcacagtgttgaacataccttttcatagagcagttttgaaacactatttttgtagtatctgcaagtggatatttggactgctttgaggccttcattggaaacgggaatatcttcacataaacactagacagaagcattctctgaaacttctttgtgatgtgtgtattcaactcacagagttgaaccatcttttttatggagcggttttgaaacagcgtttttgtagaatcagcaagtggatattgggaacactttgaggcctctggtggaaagggaatgtcttcacataaaaactggacagaagcattctcagaaacatctttgtgatgtttgcattcaactcacagagttgatccttccttttaatagggcagttttgcaacactctttttgtagaatgcaccagtgggcttttggagcacgtcaagggctatggtgaaaaaggaaatatcttctcataaaaactagactgaagtattctgtaaaactcctttgtgatgtttgcattcaactcagaaagttgaacttctctttatatagtccagttttcaaacactatttttgtagaatctgcaagtggatactgggactgctttgaggccttcgttggaaacgggattatcttcacataaaaactagactgaaggattcttagaaacttctttgtgatgtgtgcattcaactcaccgagtggaacctcacttttgatagagcagtgttgaaagacacttgttgtagaatctgcaggtggatatttggagtgctttgaagccttccttggaaacgggaatatcttcacataaaaactagacataagcattctcagaaactcctttgtgatctgtccattcagctcacagagttgaaccttccttttgatagagcagttttgaaacactctttctgtagagtctgcaagtggatatcaggagcgctttgaggcctatggtagaaaaagaaatatctgcatataaaaactagacagaagcattctgagaaacttctttgtgatgtttgcattcaactaccagagttgaaccttccttttgatagagcagttttgaaacactctttgtgtagaatctgcatgtggatatctggagcgatttgaggcctatggtcaaaaaggaaatatcttcctatgaaaaacagacaaaagcattctcagaaactacttagagatatgtgcattcaactcacagagttgaaacttttttttgatagagcagttttgaaacactctgtagaatctgaaagtggatatttggagctatttgagggctatggtggaaaagaaaatatattcccattaaactagacagaagcatcctcagaaacttctttatgatgtttgcattaaactcacagagttgaacatacctttccatagagcagttttgaaacactctttttggggaatccgcaagtggatatttggaccgctttgagacctttgctggaaatgggaatatcttcacatataaactagacagaagcattctcggaaacttcttcgtgatgtgtgcattctgctcccaaagttgaaccttccttttcataaagcagttttgaaacactcttttgtacaatctaccattggatatgtggaaggctttgatgcccatggtagaaaaggaaacatcctcatataaaatctagacagaaggattcacagaaactgctgtgtgatgtgtgcatccaaatcacggagttgaacttttcttttgttagagcagttttgaaaccctgtttccgtggaatctgccagtggacatttggagcgcattgagggctatggtggagaaggaaatatcttcacataaaaactagaaagaagcattctcagaaacatctatgtgaagtatgcattcaactcacagagttgaaccttccttttgatagaagagttttgaaacactcttttgtacaattgcaggtgaatatttggagcgctttgaagcctttgttggaaatgggaatatcctcacattaaaaactagccagaagcattctcagaaacttctttgtgatgtgtgcattgaacccagagagatgaaccgttcctttgagagagcagttttgaaacgtgtttttgtaagatctgcaagtggatatttggggcgctttgagtccttaggtggaaacgggaatatcttcgaataaaaactagacagaattattctcagaatcttctttgtgatgtgggcattcaactaacacagttgaacatttcttttgacagagcagttctgaaacactctttttgtagaatccgccagtggatatttggagcgctttgagggctattgtgcaaatggaaatatcttcacctaaaaactagaccgaagcaatcccagaaactactttgtgatgtttgcattcaactcacagagttgaacctacctcttcatagggcagtttggaaaacctctttttgtagaatctgcaagtggatatttggaccactttgaggccttcataggaaacagtactatcttcacataaaaactaggtagaagcattctcagaaacttctttgtgatgtgtgaattcaactcacagagttgaaccttcctttaatagagcagttttgaaacactctttttgtagaatttgccagtagatatttggagcgctttgaggccttcgttggaaaccggaatatcttcacataaaaagtagatagagccattctcagaaacttatttgtgatatgtagattcaactcacagcgttgaacctttcttttgatagagcagttttgaaaaactcttttatcgaatctgcaagtagacatttggagtgctttgagggctgtggtcgaaaaggaaatatcttcacatagaaactagactgaagcattctcagcaacttctttgtgacgtttgcattcatctcacagtgttgaacataccttttcatagagcagttttgaaacactatttttgtagtatctgcaagtggatatttggactgctttgaggccttcattggaaacgggaatatcttcacataaacactagacagaagcattctctgaaacttctttgtgatgtgtgtattcaactcacagagttgaaccatcttttttatggagcggttttgaaacagcgtttttgtagaatcagcaagtggatattgggaacactttgaggcctctggtggaaagggaatgtcttcacataaaaactggacagaagcattctcagaaacatctttgtgatgtttgcattcaactcacagagttgatccttccttttaatagggcagttttgcaacactctttttgtagaatgcaccagtgggcttttggagcacgtcaagggctatggtgaaaaaggaaatatcttctcataaaaactagacagaagtattctgtaaaactcctttgtgatgtttgcattcaactcagaaagttgaacttctctttatatagtccagttttcaaacactatttttgtagaatctgcaagtggatactgggactgctttgaggccttcgttggaaacgggattatcttcacatagaaactagactgaaggattcttagaaacttctttgtgatgtgtgcattcaactcaccgagtggaacctcacttttgatagagcagtgttgaaagacacttgttgtagaatctgcaggtggatatttggagtgctttgaagccttccttggaaacgggaatatcttcacataaaaactagacataagcattctcagaaactcctttgtgatctgtccattcagctcacagagttgaaccttccttttgatagagcagttttgaaacactctttctgtagagtctgcaagtggatatcaggagcgctttgaggcctatggtagaaaaagaaatatctgcatataaaaactagacagaagcattctgagaaacttctttgtgatgtttgcattcaactaccagagttgaaccttccttttgatagagcagttttgaaacactctttgtgtagaatctgcatgtggatatctggagcgatttgaggcctatggtcaaaaaggaaatatcttcctatgaaaaacagacaaaagcattctcagaaactacttagagatatgtgcattcaactcacagagttgaaacttttttttgatagagcagttttgaaacactctgtagaatctgaaagtggatatttggagctatttgagggctatggtggaaaagaaaatatattcccattaaactagacagaagcatcctcagaaacttctttatgatgtttgcattaaactcacagagttgaacatacctttccatagagcagttttgaaacactctttttggggaatccgcaagtggatatttggaccgctttgagacctttgctggaaatgggaatatcttcacatataaactagacagaagcattctcggaaacttcttcgtgatgtgtgcattctgctcccaaagttgaaccttccttttcataaagcagttttgaaacactcttttgtacaatctaccattggatatgtggaaggctttgatgcccatggtagaaaaggaaacatcctcatataaaatctagacagaaggattcacagaaactgctgtgtgatgtgtgcatccaaatcacggagttgaacttttcttttgttagagcagttttgaaaccctgtttccgtggaatctgccagtggacatttggagcgcattgagggctatggtggagaaggaaatatcttcacataaaaactagaaagaagcattctcagaaacatctatgtgaagtatgcattcaactcacagagttgaaccttccttttgatagaagagttttgaaacactcttttgtacaattgcaggtgaatatttggagcgctttgaagcctttgttggaaatgggaatatcctcacattaaaaactagccagaagcattctcagaaacttctttgtgatgtgtgcattgaacccagagagatgaaccgttcctttgagagagcagttttgaaacgtgtttttgtaagatctgcaagtggatatttggggcgctttgagtccttaggtggaaacgggaatatcttcgaataaaaactagacagaattattctcagaatcttctttgtgatgtgggcattcaactaacacagttgaacatttcttttgacagagcagttctgaaacactctttttgtagaatccgccagtggatatttggagcgctttgagggctattgtgcaaatggaaatatcttcacctaaaaactagaccgaagcaatcccagaaactactttgtgatgtttgcattcaactcacagagttgaacctacctcttcatagggcagtttggaaaacctctttttgtagaatctgcaagtggatatttggaccactttgaggccttcataggaaacagtactatcttcacataaaaactaggtagaagcattctcagaaacttctttgtgatgtgtgaattcaactcacagagttgaaccttcctttaatagagcagttttgaaacactctttttgtagaatttgccagtagatatttggagcgctttgaggccttcgttggaaaccggaatatcttcacataaaaagtagatagagccattctcagaaacttttttgtgatatgtagattcaactcacagcgttgaacctttcttttgatagagcagttttgaaaaactcttttatcgaatctgcaagtagacatttggagtgctttgagggctgtggtcgaaaaggaaatatcttcacatagaaactagactgaagcattctcagcaacttctttgtgacgtttgcattcatctcacagtgttgaacataccttttcatagagcagttttgaaacactatttttgtagtatctgcaagtggatatttggactgctttgaggccttcattggaaacgggaatatcttcacataaacactagacagaagcattctctgaaacttctttgtgatgtgtgtattcaactcacagagttgaaccatcttttttatggagcggttttgaaacagcgtttttgtagaatcagcaagtggatattgggaacactttgaggcctctggtggaaagggaatgtcttcacataaaaactggacagaagcattctcagaaacatctttgtgatgtttgcattcaactcacagagttgatccttccttttaatagggcagttttgcaacactctttttgtagaatgcaccagtgggcttttggagcacgtcaagggctatggtgaaaaaggaaatatcttctcataaaaactagactgaagtattctgtaaaactcctttgtgatgtttgcattcaactcagaaagttgaacttctctttatatagtccagttttcaaacactatttttgtagaatctgcaagtggatactgggactgctttgaggccttcgttggaaacgggattatcttcacataaaaactagactgaaggattcttagaaacttctttgtgatgtgtgcattcaactcaccgagtggaacctcacttttgatagagcagtgttgaaagacacttgttgtagaatctgcaggtggatatttggagtgctttgaagccttccttggaaacgggaatatcttcacataaaaactagacataagcattctcagaaactcctttgtgatctgtccattcagctcacagagttgaaccttccttttgatagagcagttttgaaacactctttctgtagagtctgcaagtggatatcaggagcgctttgaggcctatggtagaaaaagaaatatctgcatataaaaactagacagaagcattctgagaaacttctttgtgatgtttgcattcaactaccagagttgaaccttccttttgatagagcagttttgaaacactctttgtgtagaatctgcatgtggatatctggagcgatttgaggcctatggtcaaaaaggaaatatcttcctatgaaaaacagacaaaagcattctcagaaactacttagagatatgtgcattcaactcacagagttgaaacttttttttgatagagcagttttgaaacactctgtagaatctgaaagtggatatttggagctatttgagggctatggtggaaaagaaaatatattcccattaaactagacagaagcatcctcagaaacttctttatgatgtttgcattaaactcacagagttgaacatacctttccatagagcagttttgaaacactctttttggggaatccgcaagtggatatttggaccgctttgagacctttgctggaaatgggaatatcttcacatataaactagacagaagcattctcggaaacttcttcgtgatgtgtgcattctgctcccaaagttgaaccttccttttcataaagcagttttgaaacactcttttgtacaatctaccattggatatgtggaaggctttgatgcccatggtagaaatggaaacatcctcatataaaatctagacagaaggattcacagaaactgctgtgtgatgtgtgcatccaaatcacggagttgaacttttcttttgttagagcagttttgaaaccctgtttccgtggaatctgccagtggacatttggagcgcattgagggctatggtggagaaggaaatatcttcacataaaaactagaaagaagcattctcagaaacatctatgtgaagtatgcattcaactcacagagttgaaccttccttttgatagaagagttttgaaacactcttttgtacaattgcaggtgaatatttggagcgctttgaagcctttgttggaaatgggaatatcctcacattaaaaactagccagaagcattctcagaaacttctttgtgatgtgtgcattgaacccagagagatgaaccgttcctttgagagagcagttttgaaacgtgtttttgtaagatctgcaagtggatatttggggcgctttgagtccttaggtggaaacgggaatatcttcgaataaaaactagacagaattattctcagaatcttctttgtgatgtgggcattcaactaacacagttgaacatttcttttgacagagcagttctgaaacactctttttgtagaatccgccagtggatatttggagcgctttgagggctattgtgcaaatggaaatatcttcacctaaaaactagaccgaagcaatcccagaaactactttgtgatgtttgcattcaactcacagagttgaacctacctcttcatagggcagtttggaaaacctctttttgtagaatctgcaagtggatatttggaccactttgaggccttcataggaaacagtactatcttcacataaaaactaggtagaagcattctcagaaacttctttgtgatgtgtgaattcaactcacagagttgaaccttcctttaatagagcagttttgaaacactctttttgtagaatctgccagtagatatttggagcgctttgaggccttcgttggaaaccggaatatcttcacataaaaagtagatagaggcattctcagaaacttttttgtgatatgtagattcaactcacagcgttgaacctttcttttgatagagcagttttgaaaaactcttttatcgaatctgcaagtagacatttggagtgctttgagggctgtggtcgaaaaggaaatatcttcacatagaaactagactgaagcattctcagcaacttctttgtgacgtttgcattcatctcacagtgttgaacataccttttcatagagcagttttgaaacactatttttgtagtatctgcaagtggatatttggactgctttgaggccttcattggaaacgggaatatcttcacataaacactagacagaagcattctctgaaacttctttgtgatgtgtgtattcaactcacagagttgaaccatcttttttatggagcggttttgaaacagtgtttttgtagaatcagcaagtggatattgggagcgctttgaggcctctggtggaaagggaatgtcttcacataaaaactggacagaagtattctcagaaacatctttgtgatgtttgcattcaactcacagagttgatccttccttttaatagggcagttttgcaacactctttttgtagaatgcaccagtgggcttttggagcacgtcaagggctatggtgaaaaaggaaatatcttcacataaaaactagacagaagtattctgtaaaactcctttgtgatgtttgcattcaactcagaaagttgaacttctctttatatagtccagttttcaaacactatttttgtagcatctgcaagtggatactgggactgctttgaggccttcgttggaaacgggattaccttcacatagaaactagactgaaggattcttagaaacttctttgtgatgtgtgcattcaactcaccgagtggaacctcacttttgatagagcagtgttgaaagacacttgttgtagaatctgcaggtggatatttggagtgctttgaagacttccttggaaacgggaatatcttcacataaaaactagacataagcattctcagaaacccctttgtgatctgtccattcagctcacagagttgaaccttccttttgatagagcagttttgaaacactctttctgtagagtctgcaagtggatatcaggagcgctttgaggcctatggtagaaaaagaaatatctgcatataaaaactagacagaagcattctgagaaacttctttgtgatgtttgcattcaactaccagagttgaaccttccttttgatagagcagttttgaaacactctttgtgtagaatctgcatgtggatatctggagcgatttgaggcctatggtcagaaaggaaatatcttcctatgaaaaacagacaaaagcattctcagaaactactttgagatatgtgcattcaactcacagagttgaaacttttttttgatagaggagttttgaaacactctgtagaatctgaaagtggatatttggagctatttgagggctatggtggaaaagaaaatatattcccattaaactagacagaagcatcctcagaaacttctttatgatgtttgcattaaactcacagagttgaacatacctttccatagagcagttttgaaacactctttttggggaatccgcaagtggatatttggaccgctttgagacctttgctggaaatgggaatatcttcacatataaactagacagaagcattctcggaaacttcttcgtgatgtctgcattctgctcccaaagttgaaccttccttttcataaagcagttttgaaacactcttttgtacaatctaccattggatatgtggaaggctttgatgcccatggtagaaaaggatacatcctcatataaaatctagacagaaggattcacagaaactgctgtgtgatgtgtgcatccaaatcacggagttgaacttttcttttgttagagcagttttgaaaccctgtttccgtggaatctgccagtggacatttggagcgcattgagggctatggtggagaaggaaatatcttcacataaaaactagaaagaagcattctcagaaacatctatgtgaagtgtgcattcaactcacagagttgaaccttccttttgatagaagagttttgaaacactcttttgtacaattgcaggtgaatatttggagcgctttgaagcctttgttggaaatgggaatatcctcacataaaaactagccagaagcattctcagaaacttctttgtgatgtgtgcattgaacccagagagatgaaccgttcctttgagagagcagttttgaaacgtgtttttgtaagatctgcaagtggatatttggggcgctttgagtccttaggtggaaacgggaatatcttcgaataaaaactagacagaatgattctcagaatcttctttgtgatgtgggcattcaactaacacagttgaacatttcttttgacagagcagttctgaaacactctttttgtagaatccgccagtggatatttggagcgctttgagggctattgtgcaaatggaaatatcttcacctaaaaactagaccgaagcaatcccagaaactactttgtgatgtttgcattcaactcacagagttgaacctacctcttcatagagcagtttggaaaacctctttttgtagaatctgcaagtggatatttggaccacattgaggccttcataggaaacagtactatcttcacataaaaactaggtagaagcattgtcagaaacttctttgtgatgtgtgaattcaactcacagagttgaaccttcctttaatagagcagttttgaaacactctttttgtagaatctgccagtagatatttggagcgctttgaggccttcgttggaaaccggaatatcttcacataaaaagtagatagaggcattctcagaaacttttttgtgatatgtagattcaactcacagcgctgaacctttcttttgatagagcagttttgaaaaactcttttatcgaatctgcaagtagacatttggagtgctttgagggctgtggtcgaaaaggaaatatcttcacatagaaactagactgaagcattctcagcaacttctttgtgacctttgcattcatctcacagtgttgaacataccttttcatagagcagttttgaaacactatttttgtagtatatgcaagtggatatttggactgctttgaggccttcattggaaacgggaatatcttcacataaacactagacagaagcattctctgaaacttctttgtgatgtgtgtattcaactcacagagatgaaccatcttttttatggagcggttttgaaacagtgtttttgtagaatcagcaagtggatattgggagcgctttgaggcctctggtggaaagggaatgtcttcacataaaaactggacagaagcattctcagaaacatctttgtgatgtttgcattcaactcacagagttgatccttccttttaatagggcagttttgcaacactctttttgtagaatgcaccagtgggcttttggagcacgtcaagggctatggtgaaaaaggaaatatcttcacataaaaactagacagaagtattgtgtaaaactcctttgtgatgtttgcattcaactcagaaagttgaacttctctttatatagtccagttttcaaacactatttttgtagaatctgcaagtggatagtgggactgctttgaggccttcattggaaacgggattatcttcacataaaaactagacataagcattctcagaaactcctttgtgatctgtccattcagctcacagagttgaaccttccttttgatagagcagttttgaaacactctttctgtagagtctgcaagtggatatcaggagtgctttgtggcctatggtagaaaaagaaatatctgcatataaaaactagacagaagcattctgagaaacttctttgtgatgtttgcattcaactaccagagttgaaccttccttttgatagagcagttttgaaacactctttgtgtagaatctgcatgtggatatctggagcgatttgaggcctatggtcaaaaaggaaatatcttcctatgaaaaacagacaaaagcattctcagaaactactttgagatatgtgcattcaactcacagagttgaaacttttttttgatagagcagttttgaaacactctgtagaatctgaaagtggatatttggagctatttgagggctatggtggaaaagaaaatatattcccattaaactagacagaagcatcctcagaaacttctttatgatgtttgcattaaactcacagagttgaacatacctttccatagagcagttttgaaacactctttttggggaatccgcaagtggatatttggaccgctttgagacctttgctggaaatgggaatatcttcacatataaactagacagaagcattctcggaaacttcttcctgatgtgtgcattctgctcccaaagttgaaccttcctcttcataaagcagttttgaaacactcttttgtacaatctaccattggatatgtggaaggctttgatgcccatggtagaaaaggatacatcctcatataaaatctagacagaaggattcacagaaactgctgtgtgatgtgtgcatccaaatcatggagttgaacttttcttttgttagagcagttttgaaaccctgtttccgtggaatctgccagtggacatttggagcacattgagggctatggtggagaaggaaatatcttcacataaaaactagaaagaagcattctcagaaacatctatgtgaagtgtgcattcaactcacagagttgaaccttcgttttgatagaagagttttgaaacactcttttgtacaattgcaggtgaatatttggagcgctttgaagcctttgttggaaatgggaatatcctcacataaaaactagccagaaacattctcagaaacttctttgtgatgtgtgcattgaacccagagagatgaaccgttcctttgagagagcagttttgaaacgtgtttttgtaagatctgcaagtggatatttggggcgctttgagtccttaggtggaaacgggaatatcttcgaataaaaactagacagaatgattctcagaatcttctttgtgatgtgggcattcaacaaacacagttgaacatgtcttttgacagagcagttctgaaacactctttttgtagaatccgccagtggatatttggagcgctttgagggctattgtgcaaatggaaatatcttcacctaaaaactagaccgaagcaatcccagaaactactttgtgatgtttgcattaaactcatagagttgaacctacctcttcatagagcagtttggaaaacctctttttgtagaatctgcaagtggatatttggaccactttgaggccttcataggaaacagtactatcttcacataaaaactaggtagaagcattgtcagaaagttctttgtgatgtgtgaattcaactcacagagttgaaccttcctttaatagagcagttttgaaacactctttttgtagaatctgcaagtagatatttggagcgctttcaggccttcgttggaaaccggaatatcttcacataaaaagtagatagaggcattctcagaaacttttttgtgatatgtagattcaactcacagcgctgaacctttcttttgatagagcagttttgaaaaactcttttatcgaatctgcaagtagacatttggagtgctttgagggctgtggtcgaaaaggaaatatcttcacatagaaactagactgaagcattctcagcaacttctttgtgacgtttgcattcatctcacagtgttgaacataccttttcatagagcagttttgaaacactatttttgtagtatctgcaagtggatatttggactgctttgaggccttcattggaaacgggaatatcttcacataaacactagacagaagcattctctgaaacttctttgtgatgtgtgtattcaactcacagagttgaaccatcttttttatggagcggttttgaaacagtgtttttgtagaatcagcaattggatatttggagcgctttgaggcctctggtgtaaagggaatgtcttcacataaaaactggacagaagcattctcagaaacatctttgtgatgtttgcattcaactcacagagttgatccttccttttaatagggcagttttgcaacactctttttgtagaatgcaccagcgggcttttggagcacgtcaagggctatggtgaaaaaggaaatatcttcacaaaaaaccagacagaagtattctgtaaaactcctttgtgatgtttgcattcaactcagaaagttgaacttctctttatatagtccagttttcaaacactatttttgtagaatctgcaagtggatactgggactgctttgaggccttcgttggaaacgggattatcttcacatagaaactagactgaaggattcttagaaacttctttttgatgtgtgcattcaactcaccgagtggaacctcacttttgatagagcagtgttgaaagacacttgttgtagaatctgcaggtggatatttggagtgctttgaagccttccttggaaacgggaatatcttcacataaaaactagacataagcattctcagaaactcctttgtgatctgtccattcagctcacagagttgaaccttccttttgatagagcagttttgaaacactctttctgtagagtctgcaagtggatatcaggagcgctttgaggcctatggtagaaaaagaaatatctgcatataaaaactagacagaagcattctgagaaacttctttgtgatgtttgcattcaactaccagagttgaaccttccttttgatagagcagttttgaaacactctttgtgtagaatctgcatgtggatatctggagcgatttgaggcctatggtcaaaaaggaaatatcttcctatgaaaaacagacaaaagaattctcagaaactacttagagatatgtgcattcaactcacagagttgaaacttttttttgatagagcagttttgaaacactctgtagaatctgaaagtggatatttggagctatttgagggctatggtggaaaagaaaatatattcccattaaactagacagaagcatcctcagaaacttctttatgatgtttgcattaaactcacagagttgaacatacctttccatagagcagttttgaaacactctttttggggaatccgcaagtggatatttggaccgctttgagacctttgctggaaatgggaatatcttcacatataaactagacagaagcattcttggaaacttcttcgtgatgtgtgcattctgctcccaaagttgaaccttccttttcataaagcagttttgaaacactcttttgtacaatctaccattggatatgtggaaggctttgatgaccatggtagaaaaggaaagatcctcatataaaatctagacagaaggattcacagaaactgctgtgtgatgtgtgcatccaaatcacggagttgaacttttcttttgttagagcagttttgaaaccctgtttccgtggaatctgccagtggacatttggagcgcattgagggctatggtggagaaggaaatatcttcacataaaaactagaaagaagcattctcagaaacatctatgtgaagtgtgcattcaactcacagagttgaaccttccttttgatagaagagttttgaaacactcttttgtacaattgcaggtgaatatttggagcgctttgaagcctttgttggaaatgggaatatcctcacataaaaactagccagaagcattctcagaaacttctttgtgatgtgtgcattgaacccagagagatgaaccgttcctttgagagagcagttttgaaacgtgtttttgtaagatctgcaagtggatattaggggcgctttgagtccttaggtggaaacgggaatatcttcgaataaaaactagacagaattattctcagaatcttctttgtgatgtgggcattcaactaacacagttgaacatttcttttgacagagcagttctgaaacactctttttgtagaatccgccagtggatatttggagcgctttgagggctattgtgcaaacggaaatatcttcacctaaaaactagaccgaagcaatcccagaaactactttgtgatgtttgcattcaactcacagagttgaacctacctcttcatagagcagtttggaaaacctctttttgtagaatctgcaagtggatatttggaccactttgaggccttcataggaaacagtactatcttcacataaaaactaggtagaagcattctcagaaacttctttgtgatgtgtgaattcaactcacagagttgaaccttcctttaatagagcagttttgaaacactctttttgtagaatctgccagtagatatttggagcgctttgaggccttcgttggaaaccggaatatcttcacataaaaagtagatagaggcattctcagaaacttttttgtgatatgtagattcaactcacagcgctgaacctttcttttgatagagcagttttgaaaaactcttttatcgaatctgcaagtagacatttggagtgctttgagggctgtggtcgaaaaggaaatatcttcacatagaaactagactgaagcattctcagcaacttctttgtgacgtttgcattcatctcacagtgttgaacataccttttcatagagcagttttgaaacactatttttgtagtatctgcaagtggatatttggactgctttgaggccttcattggaaacgggaatatcttcacataaacactagacagaagcattctctgaaacttctttgtgatgtgtgtattcaactcacagagttgaaccatcttttttatggagcggttttgaaacagtgtttttgtagaatcagcaagtggatattgggagcgctttgaggcctctggtggaaagggaatgtcttcacataaaaactggacagaagcattctcagaaacatctttgtgatgtttgcattcaactcacagagttgatccttccttttaatagggcagttttgcaacactctttttgtagaatgcaccagtgggcttttggagcacgtcaagggctatggtgaaaaaggaaatatcttcacataaaaactagacagaagtattctgtaaaactcctttgtgatgtttgcattcaactcagaaagttgaacttctctttatatagtccagttttcaaacactatttttgtagaatctgcaagtggatactgggactgctttgaggccttcgttggaaacgggattatcttcacatagaaactagactgaaggattcttagaaacttctttgtgatgtgtgcattcaactcaccgagtggaacctcacttttgatagagcagtgttgaaagacacttgttgtagaatctgcaggtggatatttggagtgctttgaagccttccttggaaacgggaatatcttcacataaaaactagacataagcattctcagaaactcctttgtgatctgtccattcagctcacagagttgaaccttccttttgatagagcagttttgaaacactctttctgtagagtctgcaagtggatatcaggagcgctttgaggcctatggtagaaaaagaaatatctgcatataaaaactagacagaagcattctgagaaacttctttgtgatgtttgcattcaactaccagagttgaaccttccttttgatagagcagttttgaaacactctttgtgtagaatctgcatgtggatatctggagcgatttgaggcctatggtcaaaaaggaaatatcttcctatgaaaaacagacaaaagcattctcagaaactactttgagatatgtgcattcaactcacagagttgaaacttttttttgatagagcagttttgaaacactctgtagaatctgaaagtggatatttggagctatttgagggctatggtggaaaagaaaatatattcccattaaactagacagaagcatcctcagaaacttctttatgatgtttgcattaaactcacagagttgaacatacctttccatagagcagttttgaaacactctttttggggaatccgcaagtggatatttggactgctttgagacctttgctggaaatgggaatatcttcacatataaactagacagaagcattctcggaaacttcttcgtgatgtgtgcattctgctcccaaagttgaaccttccttttcataaagcagttttgaaacactcttttgtacaatctaccattggatatgtggaaggctttgatgcccatggtagaaaaggaaacatcctcatataaaatctagacagaaggattcacagaaactgctgtgtgatgtgtgcatccaaatcacggagttgaacttttcttttgttagagcagttttgaaaccctgtttccgtggaatctgccagtggacatttggagcgcattgagggctatggtggagaaggaaatatcttcacataaaaactagaaagaagcattctcagaaacatctatgtgaagtgtgcattcaactcacagagttgaaccttccttttgatagaagagttttgaaacactcttttgtacaattgcaggtgaatatttggagcgctttgaagcctttgttggaaatgggaatatcctcacataaaaactagccagaagcattctcagaaacttctttgtgatgtgtgcattgaacccagagagatgaaccgttcctttgagagagcagttttgaaacgtgtttttgtaagatctgcaagtggatattaggggcgctttgagtccttaggtggaaacgggaatatcttcgaataaaaactagacagaattattctcagaatcttctttgtgatgtgggcattcaactaacacagttgaacatttcttttgacagagcagttctgaaacactctttttgtagaatccgccagtggatatttggagcgctttgagggctattgtgcaaacggaaatatcttcacctaaaaactagaccgaagcaatcccagaaactactttgtgatgtttgcattcaactcacagagttgaacctacctcttcatagagcagtttggaaaacctctttttgtagaatctgcaagtggatatttggaccactttgaggccttcataggaaacagtactatcttcacataaaaactaggtagaagcattctcagaaacttctttgtgatgtgtgaattcaactcacagagttgaaccttcctttaatagagcagttttgaaacactctttttgtagaatctgccagtagatatttggagcgctttgaggccttcgttggaaaccggaatatcttcacataaaaagtagatagaggcattctcagaaacttttttgtgatatgtagattcaactcacagcgctgaacctttcttttgatagagcagttttgaaaaactcttttatcgaatctgcaagtagacatttggagtgctttgagggctgtggtcgaaaaggaaatatcttcacatagaaactagactgaagcattctcagcaacttctttgtgacgtttgcattcatctcacagtgttgaacataccttttcatagagcagttttgaaacactatttttgtagtatctgcaagtggatatttggactgctttgaggccttcattggaaacgggaatatcttcacataaacactagacagaagcattctctgaaacttctttgtgatgtgtgtattcaactcacagagttgaaccatcttttttatggagcggttttgaaacagtgtttttgtagaatcaacaagtggatattgggagcgctttgaggcctctggtggaaagggaatgtcttcacataaaaactggacagaagcattctcagaaacatctttgtgatgtttgcattcaactcacagagttgatccttccttttaatagggcagttttgcaacactctttttgtagaatgcaccagtgggcttttggggcacgtcaagggctatggtgaaaaaggaaatatcttcacataaaaactagacagaagtattctgtaaaactcctttgtgatgtttgcattcaactcagaaagttgaacttctctttatatagtccagttttcaaacactatttttgtagaatctgcaagtggatactgggactgctttgaggctatcgttggaaacaggattatcttcacataaaaactagactgaaggattcttagaaacttctttgtgatgtgtgcattcaactcaccgagtggaacctcacttttgatagagcagtgttgaaagacacttgttgtagaatctgcaggtggatatttggagtgctttgaagccttccttggaaacgggaatatcttcacataaaaactagacataagcattctcagaaactcctttgtgatctgtccattcagctcacagagttgaaccttccttttgatagagcagttttgaaacactctttctgtagagtctgcaagtggatatcaggagcgctttgaggcctatggtagaaaaagaaatatctgcatataaaaactagacagaagcattctgagaaacttctttgtgatgtttgcattcaactaccagagttgaaccttccttttgatagagcagttttgaaacactctttgtgtagaatctgcatgtggatatcaggagcgctttgaggcctatggcagaaaaagaaatatctggctctaaaaactagacagaagcattctgagaaacttctttgtgatgtttgcattcaactaccagagttgaaccttccttttgatagagcagttttgaaacactctttgtgtagaatctgcatgtggatatctggagcgatttgaggcctatggtcaaaaaggaaatatcttcctatgaaaaacagacaaaagcattctcagaaactacttagagatatgtgcattcaactcacagagttgaaacttttttttgatagagcagttttgaaacaatctgtagaatctgaaagtggatatttggagctatttgagggctatggtggaaaagaaaatatattcccattaaactagacagaagcatcctcagaaacttctttgtgatgtttgcattaaactcacagagttgaacatacctttccatagagcagttttgaaacactctttttggggaatccgcaagtggatatttggaccgctttgagacctttgctggaaatgggaatatcttcacatataaactagacagaagcattctcggaaacttcttcgtgatgtgtgcattctgctcccaaagttgaaccttccttttcataaagcagttttgaaacactcttttgtacaatctaccattggatatgtggaaggatttgatgcccatggtagaaaaggaaacatcctcatataaaatctagacagaaggattcacagaaactgctgtgtgatgtgtgcatccaaatcacggagttgaacttttcttttgttagagcagttttgaaaccctgtttccgtggaatctgccagtggacatttggagcgcattgagggctatggtggagaaggaaatatcttcacataaaaactagaaagaagcattctcagaaacatctatgtgaagtgtgcattcaactcacagagttgaaccttccttttgatagaagagttttgaaacactcttttgtacaattgcaggtgaatatttggagcgctttgaagcctttgttggaaatgggaatatcctcacataaaaactagccagaagcattctcagaaacttctttgtgatgtgtgcattgaacccagagagatgaaccgttcctttgagagagcagttttgaaacgtgtttttgtaagatctgcaagtggatattaggggcgctttgagtccttaggtggaaacgggaatatcttcgaataaaaactagacagaattattctcagaatcttctttgtgatgtgggcattcaactaacacagttgaacatttcttttgacagagcagttctgaaacactctttttgtagaatccgccagtggatatttggagcgctttgagggctattgtgcaaatggaaatatcttcacctaaaaactagaccgaagcaatcccagaaactactttgtgatgtttgcattcaactcacagagttgaacctacctcttcatagagcagtttggaaaacctctttttgtagaatctgcaagtggatatttggaccactttgaggccttcataggaaacagtactatcttcacataaaaactaggtagaagcattctcagaaacttctttgtgatgtgtgaattcaactcacagtgttgaaccttcctttaatagagcagttttgaaacactctttttgtagaatctgccagtagatatttggagcgctttgaggccttcgttggaaaccggaatatcttcacataaaaagtagatagaggcattctcagaaacttttttgtgatatgtagattcaactcacagcgctgaacctttcttttgatagagcagttttgaaaaactcttttatcgaatctgcaagtagacatttggagtgctttgagggctgtggtcgaaaaggaaatatcttcacatagaaactagactgaagcattctcagcaacttctttgtgacgtttgcattcatctcacagtgttgaacataccttttcatagagcagttttgaaacactatttttgtagtatctgcaagtggatatttggactgctttgaggccttcattggaaacgggaatatcttcacataaacactagacagaagcattctctgaaacttctttgtgatgtgtgtattcaactcacagagttgaaccatcttttttatggagcggttttgaaacagtgttttttgtagaatcagcaattggatattgggagcgctttgaggcctctggtggaaagggaatgtcttcacataaaaactggacagaagcattctcagaaacatctttgtgatgtttgcattcaactcacagagttgatccttccttttaatagggcagttttgcaacactctttttgtagaatgcaccagtgggcttttggggcacgtcaagggctatggtgaaaaaggaaatatcttcacataaaaactagacagaagtattctgtaaaactcctttgtgatgtttgcattcaactcagaaagttgaacttctctttatatagtccagttttcaaacactatttttgtagaatctgcaagtggatactgggactgctttgaggctatcgttggaaacaggattatcttcacataaaaactagactgaaggattcttagaaacttctttgtgatgtgtgcattcaactcaccgagtggaacctcacttttgatagagcagtgttgaaagacacttgttgtagaatctgcaggtggatatttggagtgctttgaagccttccttggaaacgggaatatcttcacataaaaactagacataagcattctcagaaactcctttgtgatctgtccattcagctcacagagttgaaccttccttttgatagagcagttttgaaacactctttctgtagagtctgcaagtggatatcaggagcgctttgaggcctatggtagaaaaagaaatatctgcatataaaaactagacagaagcattctgagaaacttctttgtgatgtttgcattcaactaccagagttgaaccttccttttgatagagcagttttgaaacactctttgtgtagaatctgcatgtggatatcaggagcgctttgaggcctatggcagaaaaagaaatatctggctctaaaaactagacagaagcattctgagaaacttctttgtgatgtttgcattcaactaccagagttgaaccttccttttgatagagcagttttgaaacactctttgtgtagaatctgcatgtggatatctggagcgatttgaggcctatggtcaaaaaggaaatatcttcctatgaaaaacagacaaaagcattctcagaaactacttagagatatgtgcattcaactcacagagttgaaacttttttttgatagagcagttttgaaacaatctgtagaatctgaaagtggatatttggagctatttgagggctatggtggaaaagaaaatatattcccattaaactagacagaagcatcctcagaaacttctttgtgatgtttgcattaaactcacagagttgaacatacctttccatagagcagttttgaaacactctttttggggaatccgcaagtggatatttggaccgctttgagacctttgctggaaatgggaatatcttcacatataaactagacagaagcattcttggaaacttcttcgtgatgtgtgcattctgctcccaaagttgaaccttccttttcataaagcagttttgaaacactcttttgtacaatctaccattggatatgtggaaggctttgatgcccatggtagaaaaggaaagatcctcatataaaatctagacagaaggattcacagaaactgctgtgtgatgtgtgcatccaaatcacggagttgaacttttcttttgttagagcagttttgaaaccctgtttccgtggaatctgccagtggacatttggagcgcattgagggctatggtggagaaggaaatatcttcacataaaaactagaaagaagcattctcagaaacatctatgtgaagtgtgcattcaactcacagagttgaaccttccttttgatagaagagttttgaaacactcttttgtacaattgcaggtgaatatttggagcgctttgaagcctttgttggaaatgggaatatcctcacataaaaactagccagaagcattctcagaaacttctttgtgatgtgtgcattgaacccagagagatgaaccgttcctttgagagagcagttttgaaacgtgtttttgtaagatctgcaagtggatattaggggcgctttgagtccttaggtggaaacgggaatatcttcgaataaaaactagacagaattattctcagaatcttctttgtgatgtgggcattcaactaacacagttgaacatttcttttgacagagcagttctgaaacactctttttgtagaatccgccagtggatatttggagcgctttgagggctattgtgcaaatggaaatatcttcacctaaaaactagaccgaagcaatcccagaaactactttgtgatgtttgcattcaactcacagagttgaacctacctcttcatagagcagtttggaaaacctctttttgtagaatctgcaagtggatatttggaccactttgaggccttcataggaaacagtactatcttcacataaaaactaggtagaagcattctcagaaacttctttgtgatgtgtgaattcnnnnnnnnnnnnnnnnnnnnnnnnnnnnnnnnnnnnnnnnnnnnnnnnnnnnnnnnnnnnnnnnnnnnnnnnnnnnnnnnnnnnnnnnnnnnnnnnnnnnnnnnnnnnnnnnnnnnnnnnnnnnnnnnnnnnnnnnnnnnnnnnnnnnnnnnnnnnnnnnnnnnnnnnnnnnnnnnnnnnnnnnnnnnnnnnnnnnnnnnnnnnnnnnnnnnnnnnnnnnnnnnnnnnnnnnnnnnnnnnnnnnnnnnnnnnnnnnnnnnnnnnnnnnnnnnnnnnnnnnnnnnnnnnnnnnnnnnnnnnnnnnnnnnnnnnnnnnnnnnnnnnnnnnnnnnnnnnnnnnnnnnnnnnnnnnnnnnnnnnnnnnnnnnnnnnnnnnnnnnnnnnnnnnnnnnnnnnnnnnnnnnnnnnnnnnnnnnnnnnnnnnnnnnnnnnnnnnnnnnnnnnnnnnnnnnnnnnnnnnnnnnnnnnnnnnnnnnnnnnnnnnnnnnnnnnnnnnnnnnnnnnnnnnnnnnnnnnnnnnnnnnnnnnnnnnnnnnnnnnnnnnnnnnnnnnnnnnnnnnnnnnnnnnnnnnnnnnnnnnnnnnnnnnnnnnnnnnnnnnnnnnnnnnnnnnnnnnnnnnnnnnnnnnnnnnnnnnnnnnnnnnnnnnnnnnnnnnnnnnnnnnnnnnnnnnnnnnnnnnnnnnnnnnnnnnnnnnnnnnnnnnnnnnnnnnnnnnnnnnnnnnnnnnnnnnnnnnnnnnnnnnnnnnnnnnnnnnnnnnnnnnnnnnnnnnnnnnnnnnnnnnnnnnnnnnnnnnnnnnnnnnnnnnnnnnnnnnnnnnnnnnnnnnnnnnnnnnnnnnnnnnnnnnnnnnnnnnnnnnnnnnnnnnnnnnnnnnnnnnnnnnnnnnnnnnnnnnnnnnnnnnnnnnnnnnnnnnnnnnnnnnnnnnnnnnnnnnnnnnnnnnnnnnnnnnnnnnnnnnnnnnnnnnnnnnnnnnnnnnnnnnnnnnnnnnnnnnnnnnnnnnnnnnnnnnnnnnnnnnnnnnnnnnnnnnnnnnnnnnnnnnnnnnnnnnnnnnnnnnnnnnnnnnnnnnnnnnnnnnnnnnnnnnnnnnnnnnnnnnnnnnnnnnnnnnnnnnnnnnnnnnnnnnnnnnnnnnnnnnnnnnnnnnnnnnnnnnnnnnnnnnnnnnnnnnnnnnnnnnnnnnnnnnnnnnnnnnnnnnnnnnnnnnnnnnnnnnnnnnnnnnnnnnnnnnnnnnnnnnnnnnnnnnnnnnnnnnnnnnnnnnnnnnnnnnnnnnnnnnnnnnnnnnnnnnnnnnnnnnnnnnnnnnnnnnnnnnnnnnnnnnnnnnnnnnnnnnnnnnnnnnnnnnnnnnnnnnnnnnnnnnnnnnnnnnnnnnnnnnnnnnnnnnnnnnnnnnnnnnnnnnnnnnnnnnnnnnnnnnnnnnnnnnnnnnnnnnnnnnnnnnnnnnnnnnnnnnnnnnnnnnnnnnnnnnnnnnnnnnnnnnnnnnnnnnnnnnnnnnnnnnnnnnnnnnnnnnnnnnnnnnnnnnnnnnnnnnnnnnnnnnnnnnnnnnnnnnnnnnnnnnnnnnnnnnnnnnnnnnnnnnnnnnnnnnnnnnnnnnnnnnnnnnnnnnnnnnnnnnnnnnnnnnnnnnnnnnnnnnnnnnnnnnnnnnnnnnnnnnnnnnnnnnnnnnnnnnnnnnnnnnnnnnnnnnnnnnnnnnnnnnnnnnnnnnnnnnnnnnnnnnnnnnnnnnnnnnnnnnnnnnnnnnnnnnnnnnnnnnnnnnnnnnnnnnnnnnnnnnnnnnnnnnnnnnnnnnnnnnnnnnnnnnnnnnnnnnnnnnnnnnnnnnnnnnnnnnnnnnnnnnnnnnnnnnnnnnnnnnnnnnnnnnnnnnnnnnnnnnnnnnnnnnnnnnnnnnnnnnnnnnnnnnnnnnnnnnnnnnnnnnnnnnnnnnnnnnnnnnnnnnnnnnnnnnnnnnnnnnnnnnnnnnnnnnnnnnnnnnnnnnnnnnnnnnnnnnnnnnnnnnnnnnnnnnnnnnnnnnnnnnnnnnnnnnnnnnnnnnnnnnnnnnnnnnnnnnnnnnnnnnnnnnnnnnnnnnnnnnnnnnnnnnnnnnnnnnnnnnnnnnnnnnnnnnnnnnnnnnnnnnnnnnnnnnnnnnnnnnnnnnnnnnnnnnnnnnnnnnnnnnnnnnnnnnnnnnnnnnnnnnnnnnnnnnnnnnnnnnnnnnnnnnnnnnnnnnnnnnnnnnnnnnnnnnnnnnnnnnnnnnnnnnnnnnnnnnnnnnnnnnnnnnnnnnnnnnnnnnnnnnnnnnnnnnnnnnnnnnnnnnnnnnnnnnnnnnnnnnnnnnnnnnnnnnnnnnnnnnnnnnnnnnnnnnnnnnnnnnnnnnnnnnnnnnnnnnnnnnnnnnnnnnnnnnnnnnnnnnnnnnnnnnnnnnnnnnnnnnnnnnnnnnnnnnnnnnnnnnnnnnnnnnnnnnnnnnnnnnnnnnnnnnnnnnnnnnnnnnnnnnnnnnnnnnnnnnnnnnnnnnnnnnnnnnnnnnnnnnnnnnnnnnnnnnnnnnnnnnnnnnnnnnnnnnnnnnnnnnnnnnnnnnnnnnnnnnnnnnnnnnnnnnnnnnnnnnnnnnnnnnnnnnnnnnnnnnnnnnnnnnnnnnnnnnnnnnnnnnnnnnnnnnnnnnnnnnnnnnnnnnnnnnnnnnnnnnnnnnnnnnnnnnnnnnnnnnnnnnnnnnnnnnnnnnnnnnnnnnnnnnnnnnnnnnnnnnnnnnnnnnnnnnnnnnnnnnnnnnnnnnnnnnnnnnnnnnnnnnnnnnnnnnnnnnnnnnnnnnnnnnnnnnnnnnnnnnnnnnnnnnnnnnnnnnnnnnnnnnnnnnnnnnnnnnnnnnnnnnnnnnnnnnnnnnnnnnnnnnnnnnnnnnnnnnnnnnnnnnnnnnnnnnnnnnnnnnnnnnnnnnnnnnnnnnnnnnnnnnnnnnnnnnnnnnnnnnnnnnnnnnnnnnnnnnnnnnnnnnnnnnnnnnnnnnnnnnnnnnnnnnnnnnnnnnnnnnnnnnnnnnnnnnnnnnnnnnnnnnnnnnnnnnnnnnnnnnnnnnnnnnnnnnnnnnnnnnnnnnnnnnnnnnnnnnnnnnnnnnnnnnnnnnnnnnnnnnnnnnnnnnnnnnnnnnnnnnnnnnnnnnnnnnnnnnnnnnnnnnnnnnnnnnnnnnnnnnnnnnnnnnnnnnnnnnnnnnnnnnnnnnnnnnnnnnnnnnnnnnnnnnnnnnnnnnnnnnnnnnnnnnnnnnnnnnnnnnnnnnnnnnnnnnnnnnnnnnnnnnnnnnnnnnnnnnnnnnnnnnnnnnnnnnnnnnnnnnnnnnnnnnnnnnnnnnnnnnnnnnnnnnnnnnnnnnnnnnnnnnnnnnnnnnnnnnnnnnnnnnnnnnnnnnnnnnnnnnnnnnnnnnnnnnnnnnnnnnnnnnnnnnnnnnnnnnnnnnnnnnnnnnnnnnnnnnnnnnnnnnnnnnnnnnnnnnnnnnnnnnnnnnnnnnnnnnnnnnnnnnnnnnnnnnnnnnnnnnnnnnnnnnnnnnnnnnnnnnnnnnnnnnnnnnnnnnnnnnnnnnnnnnnnnnnnnnnnnnnnnnnnnnnnnnnnnnnnnnnnnnnnnnnnnnnnnnnnnnnnnnnnnnnnnnnnnnnnnnnnnnnnnnnnnnnnnnnnnnnnnnnnnnnnnnnnnnnnnnnnnnnnnnnnnnnnnnnnnnnnnnnnnnnnnnnnnnnnnnnnnnnnnnnnnnnnnnnnnnnnnnnnnnnnnnnnnnnnnnnnnnnnnnnnnnnnnnnnnnnnnnnnnnnnnnnnnnnnnnnnnnnnnnnnnnnnnnnnnnnnnnnnnnnnnnnnnnnnnnnnnnnnnnnnnnnnnnnnnnnnnnnnnnnnnnnnnnnnnnnnnnnnnnnnnnnnnnnnnnnnnnnnnnnnnnnnnnnnnnnnnnnnnnnnnnnnnnnnnnnnnnnnnnnnnnnnnnnnnnnnnnnnnnnnnnnnnnnnnnnnnnnnnnnnnnnnnnnnnnnnnnnnnnnnnnnnnnnnnnnnnnnnnnnnnnnnnnnnnnnnnnnnnnnnnnnnnnnnnnnnnnnnnnnnnnnnnnnnnnnnnnnnnnnnnnnnnnnnnnnnnnnnnnnnnnnnnnnnnnnnnnnnnnnnnnnnnnnnnnnnnnnnnnnnnnnnnnnnnnnnnnnnnnnnnnnnnnnnnnnnnnnnnnnnnnnnnnnnnnnnnnnnnnnnnnnnnnnnnnnnnnnnnnnnnnnnnnnnnnnnnnnnnnnnnnnnnnnnnnnnnnnnnnnnnnnnnnnnnnnnnnnnnnnnnnnnnnnnnnnnnnnnnnnnnnnnnnnnnnnnnnnnnnnnnnnnnnnnnnnnnnnnnnnnnnnnnnnnnnnnnnnnnnnnnnnnnnnnnnnnnnnnnnnnnnnnnnnnnnnnnnnnnnnnnnnnnnnnnnnnnnnnnnnnnnnnnnnnnnnnnnnnnnnnnnnnnnnnnnnnnnnnnnnnnnnnnnnnnnnnnnnnnnnnnnnnnnnnnnnnnnnnnnnnnnnnnnnnnnnnnnnnnnnnnnnnnnnnnnnnnnnnnnnnnnnnnnnnnnnnnnnnnnnnnnnnnnnnnnnnnnnnnnnnnnnnnnnnnnnnnnnnnnnnnnnnnnnnnnnnnnnnnnnnnnnnnnnnnnnnnnnnnnnnnnnnnnnnnnnnnnnnnnnnnnnnnnnnnnnnnnnnnnnnnnnnnnnnnnnnnnnnnnnnnnnnnnnnnnnnnnnnnnnnnnnnnnnnnnnnnnnnnnnnnnnnnnnnnnnnnnnnnnnnnnnnnnnnnnnnnnnnnnnnnnnnnnnnnnnnnnnnnnnnnnnnnnnnnnnnnnnnnnnnnnnnnnnnnnnnnnnnnnnnnnnnnnnnnnnnnnnnnnnnnnnnnnnnnnnnnnnnnnnnnnnnnnnnnnnnnnnnnnnnnnnnnnnnnnnnnnnnnnnnnnnnnnnnnnnnnnnnnnnnnnnnnnnnnnnnnnnnnnnnnnnnnnnnnnnnnnnnnnnnnnnnnnnnnnnnnnnnnnnnnnnnnnnnnnnnnnnnnnnnnnnnnnnnnnnnnnnnnnnnnnnnnnnnnnnnnnnnnnnnnnnnnnnnnnnnnnnnnnnnnnnnnnnnnnnnnnnnnnnnnnnnnnnnnnnnnnnnnnnnnnnnnnnnnnnnnnnnnnnnnnnnnnnnnnnnnnnnnnnnnnnnnnnnnnnnnnnnnnnnnnnnnnnnnnnnnnnnnnnnnnnnnnnnnnnnnnnnnnnnnnnnnnnnnnnnnnnnnnnnnnnnnnnnnnnnnnnnnnnnnnnnnnnnnnnnnnnnnnnnnnnnnnnnnnnnnnnnnnnnnnnnnnnnnnnnnnnnnnnnnnnnnnnnnnnnnnnnnnnnnnnnnnnnnnnnnnnnnnnnnnnnnnnnnnnnnnnnnnnnnnnnnnnnnnnnnnnnnnnnnnnnnnnnnnnnnnnnnnnnnnnnnnnnnnnnnnnnnnnnnnnnnnnnnnnnnnnnnnnnnnnnnnnnnnnnnnnnnnnnnnnnnnnnnnnnnnnnnnnnnnnnnnnnnnnnnnnnnnnnnnnnnnnnnnnnnnnnnnnnnnnnnnnnnnnnnnnnnnnnnnnnnnnnnnnnnnnnnnnnnnnnnnnnnnnnnnnnnnnnnnnnnnnnnnnnnnnnnnnnnnnnnnnnnnnnnnnnnnnnnnnnnnnnnnnnnnnnnnnnnnnnnnnnnnnnnnnnnnnnnnnnnnnnnnnnnnnnnnnnnnnnnnnnnnnnnnnnnnnnnnnnnnnnnnnnnnnnnnnnnnnnnnnnnnnnnnnnnnnnnnnnnnnnnnnnnnnnnnnnnnnnnnnnnnnnnnnnnnnnnnnnnnnnnnnnnnnnnnnnnnnnnnnnnnnnnnnnnnnnnnnnnnnnnnnnnnnnnnnnnnnnnnnnnnnnnnnnnnnnnnnnnnnnnnnnnnnnnnnnnnnnnnnnnnnnnnnnnnnnnnnnnnnnnnnnnnnnnnnnnnnnnnnnnnnnnnnnnnnnnnnnnnnnnnnnnnnnnnnnnnnnnnnnnnnnnnnnnnnnnnnnnnnnnnnnnnnnnnnnnnnnnnnnnnnnnnnnnnnnnnnnnnnnnnnnnnnnnnnnnnnnnnnnnnnnnnnnnnnnnnnnnnnnnnnnnnnnnnnnnnnnnnnnnnnnnnnnnnnnnnnnnnnnnnnnnnnnnnnnnnnnnnnnnnnnnnnnnnnnnnnnnnnnnnnnnnnnnnnnnnnnnnnnnnnnnnnnnnnnnnnnnnnnnnnnnnnnnnnnnnnnnnnnnnnnnnnnnnnnnnnnnnnnnnnnnnnnnnnnnnnnnnnnnnnnnnnnnnnnnnnnnnnnnnnnnnnnnnnnnnnnnnnnnnnnnnnnnnnnnnnnnnnnnnnnnnnnnnnnnnnnnnnnnnnnnnnnnnnnnnnnnnnnnnnnnnnnnnnnnnnnnnnnnnnnnnnnnnnnnnnnnnnnnnnnnnnnnnnnnnnnnnnnnnnnnnnnnnnnnnnnnnnnnnnnnnnnnnnnnnnnnnnnnnnnnnnnnnnnnnnnnnnnnnnnnnnnnnnnnnnnnnnnnnnnnnnnnnnnnnnnnnnnnnnnnnnnnnnnnnnnnnnnnnnnnnnnnnnnnnnnnnnnnnnnnnnnnnnnnnnnnnnnnnnnnnnnnnnnnnnnnnnnnnnnnnnnnnnnnnnnnnnnnnnnnnnnnnnnnnnnnnnnnnnnnnnnnnnnnnnnnnnnnnnnnnnnnnnnnnnnnnnnnnnnnnnnnnnnnnnnnnnnnnnnnnnnnnnnnnnnnnnnnnnnnnnnnnnnnnnnnnnnnnnnnnnnnnnnnnnnnnnnnnnnnnnnnnnnnnnnnnnnnnnnnnnnnnnnnnnnnnnnnnnnnnnnnnnnnnnnnnnnnnnnnnnnnnnnnnnnnnnnnnnnnnnnnnnnnnnnnnnnnnnnnnnnnnnnnnnnnnnnnnnnnnnnnnnnnnnnnnnnnnnnnnnnnnnnnnnnnnnnnnnnnnnnnnnnnnnnnnnnnnnnnnnnnnnnnnnnnnnnnnnnnnnnnnnnnnnnnnnnnnnnnnnnnnnnnnnnnnnnnnnnnnnnnnnnnnnnnnnnnnnnnnnnnnnnnnnnnnnnnnnnnnnnnnnnnnnnnnnnnnnnnnnnnnnnnnnnnnnnnnnnnnnnnnnnnnnnnnnnnnnnnnnnnnnnnnnnnnnnnnnnnnnnnnnnnnnnnnnnnnnnnnnnnnnnnnnnnnnnnnnnnnnnnnnnnnnnnnnnnnnnnnnnnnnnnnnnnnnnnnnnnnnnnnnnnnnnnnnnnnnnnnnnnnnnnnnnnnnnnnnnnnnnnnnnnnnnnnnnnnnnnnnnnnnnnnnnnnnnnnnnnnnnnnnnnnnnnnnnnnnnnnnnnnnnnnnnnnnnnnnnnnnnnnnnnnnnnnnnnnnnnnnnnnnnnnnnnnnnnnnnnnnnnnnnnnnnnnnnnnnnnnnnnnnnnnnnnnnnnnnnnnnnnnnnnnnnnnnnnnnnnnnnnnnnnnnnnnnnnnnnnnnnnnnnnnnnnnnnnnnnnnnnnnnnnnnnnnnnnnnnnnnnnnnnnnnnnnnnnnnnnnnnnnnnnnnnnnnnnnnnnnnnnnnnnnnnnnnnnnnnnnnnnnnnnnnnnnnnnnnnnnnnnnnnnnnnnnnnnnnnnnnnnnnnnnnnnnnnnnnnnnnnnnnnnnnnnnnnnnnnnnnnnnnnnnnnnnnnnnnnnnnnnnnnnnnnnnnnnnnnnnnnnnnnnnnnnnnnnnnnnnnnnnnnnnnnnnnnnnnnnnnnnnnnnnnnnnnnnnnnnnnnnnnnnnnnnnnnnnnnnnnnnnnnnnnnnnnnnnnnnnnnnnnnnnnnnnnnnnnnnnnnnnnnnnnnnnnnnnnnnnnnnnnnnnnnnnnnnnnnnnnnnnnnnnnnnnnnnnnnnnnnnnnnnnnnnnnnnnnnnnnnnnnnnnnnnnnnnnnnnnnnnnnnnnnnnnnnnnnnnnnnnnnnnnnnnnnnnnnnnnnnnnnnnnnnnnnnnnnnnnnnnnnnnnnnnnnnnnnnnnnnnnnnnnnnnnnnnnnnnnnnnnnnnnnnnnnnnnnnnnnnnnnnnnnnnnnnnnnnnnnnnnnnnnnnnnnnnnnnnnnnnnnnnnnnnnnnnnnnnnnnnnnnnnnnnnnnnnnnnnnnnnnnnnnnnnnnnnnnnnnnnnnnnnnnnnnnnnnnnnnnnnnnnnnnnnnnnnnnnnnnnnnnnnnnnnnnnnnnnnnnnnnnnnnnnnnnnnnnnnnnnnnnnnnnnnnnnnnnnnnnnnnnnnnnnnnnnnnnnnnnnnnnnnnnnnnnnnnnnnnnnnnnnnnnnnnnnnnnnnnnnnnnnnnnnnnnnnnnnnnnnnnnnnnnnnnnnnnnnnnnnnnnnnnnnnnnnnnnnnnnnnnnnnnnnnnnnnnnnnnnnnnnnnnnnnnnnnnnnnnnnnnnnnnnnnnnnnnnnnnnnnnnnnnnnnnnnnnnnnnnnnnnnnnnnnnnnnnnnnnnnnnnnnnnnnnnnnnnnnnnnnnnnnnnnnnnnnnnnnnnnnnnnnnnnnnnnnnnnnnnnnnnnnnnnnnnnnnnnnnnnnnnnnnnnnnnnnnnnnnnnnnnnnnnnnnnnnnnnnnnnnnnnnnnnnnnnnnnnnnnnnnnnnnnnnnnnnnnnnnnnnnnnnnnnnnnnnnnnnnnnnnnnnnnnnnnnnnnnnnnnnnnnnnnnnnnnnnnnnnnnnnnnnnnnnnnnnnnnnnnnnnnnnnnnnnnnnnnnnnnnnnnnnnnnnnnnnnnnnnnnnnnnnnnnnnnnnnnnnnnnnnnnnnnnnnnnnnnnnnnnnnnnnnnnnnnnnnnnnnnnnnnnnnnnnnnnnnnnnnnnnnnnnnnnnnnnnnnnnnnnnnnnnnnnnnnnnnnnnnnnnnnnnnnnnnnnnnnnnnnnnnnnnnnnnnnnnnnnnnnnnnnnnnnnnnnnnnnnnnnnnnnnnnnnnnnnnnnnnnnnnnnnnnnnnnnnnnnnnnnnnnnnnnnnnnnnnnnnnnnnnnnnnnnnnnnnnnnnnnnnnnnnnnnnnnnnnnnnnnnnnnnnnnnnnnnnnnnnnnnnnnnnnnnnnnnnnnnnnnnnnnnnnnnnnnnnnnnnnnnnnnnnnnnnnnnnnnnnnnnnnnnnnnnnnnnnnnnnnnnnnnnnnnnnnnnnnnnnnnnnnnnnnnnnnnnnnnnnnnnnnnnnnnnnnnnnnnnnnnnnnnnnnnnnnnnnnnnnnnnnnnnnnnnnnnnnnnnnnnnnnnnnnnnnnnnnnnnnnnnnnnnnnnnnnnnnnnnnnnnnnnnnnnnnnnnnnnnnnnnnnnnnnnnnnnnnnnnnnnnnnnnnnnnnnnnnnnnnnnnnnnnnnnnnnnnnnnnnnnnnnnnnnnnnnnnnnnnnnnnnnnnnnnnnnnnnnnnnnnnnnnnnnnnnnnnnnnnnnnnnnnnnnnnnnnnnnnnnnnnnnnnnnnnnnnnnnnnnnnnnnnnnnnnnnnnnnnnnnnnnnnnnnnnnnnnnnnnnnnnnnnnnnnnnnnnnnnnnnnnnnnnnnnnnnnnnnnnnnnnnnnnnnnnnnnnnnnnnnnnnnnnnnnnnnnnnnnnnnnnnnnnnnnnnnnnnnnnnnnnnnnnnnnnnnnnnnnnnnnnnnnnnnnnnnnnnnnnnnnnnnnnnnnnnnnnnnnnnnnnnnnnnnnnnnnnnnnnnnnnnnnnnnnnnnnnnnnnnnnnnnnnnnnnnnnnnnnnnnnnnnnnnnnnnnnnnnnnnnnnnnnnnnnnnnnnnnnnnnnnnnnnnnnnnnnnnnnnnnnnnnnnnnnnnnnnnnnnnnnnnnnnnnnnnnnnnnnnnnnnnnnnnnnnnnnnnnnnnnnnnnnnnnnnnnnnnnnnnnnnnnnnnnnnnnnnnnnnnnnnnnnnnnnnnnnnnnnnnnnnnnnnnnnnnnnnnnnnnnnnnnnnnnnnnnnnnnnnnnnnnnnnnnnnnnnnnnnnnnnnnnnnnnnnnnnnnnnnnnnnnnnnnnnnnnnnnnnnnnnnnnnnnnnnnnnnnnnnnnnnnnnnnnnnnnnnnnnnnnnnnnnnnnnnnnnnnnnnnnnnnnnnnnnnnnnnnnnnnnnnnnnnnnnnnnnnnnnnnnnnnnnnnnnnnnnnnnnnnnnnnnnnnnnnnnnnnnnnnnnnnnnnnnnnnnnnnnnnnnnnnnnnnnnnnnnnnnnnnnnnnnnnnnnnnnnnnnnnnnnnnnnnnnnnnnnnnnnnnnnnnnnnnnnnnnnnnnnnnnnnnnnnnnnnnnnnnnnnnnnnnnnnnnnnnnnnnnnnnnnnnnnnnnnnnnnnnnnnnnnnnnnnnnnnnnnnnnnnnnnnnnnnnnnnnnnnnnnnnnnnnnnnnnnnnnnnnnnnnnnnnnnnnnnnnnnnnnnnnnnnnnnnnnnnnnnnnnnnnnnnnnnnnnnnnnnnnnnnnnnnnnnnnnnnnnnnnnnnnnnnnnnnnnnnnnnnnnnnnnnnnnnnnnnnnnnnnnnnnnnnnnnnnnnnnnnnnnnnnnnnnnnnnnnnnnnnnnnnnnnnnnnnnnnnnnnnnnnnnnnnnnnnnnnnnnnnnnnnnnnnnnnnnnnnnnnnnnnnnnnnnnnnnnnnnnnnnnnnnnnnnnnnnnnnnnnnnnnnnnnnnnnnnnnnnnnnnnnnnnnnnnnnnnnnnnnnnnnnnnnnnnnnnnnnnnnnnnnnnnnnnnnnnnnnnnnnnnnnnnnnnnnnnnnnnnnnnnnnnnnnnnnnnnnnnnnnnnnnnnnnnnnnnnnnnnnnnnnnnnnnnnnnnnnnnnnnnnnnnnnnnnnnnnnnnnnnnnnnnnnnnnnnnnnnnnnnnnnnnnnnnnnnnnnnnnnnnnnnnnnnnnnnnnnnnnnnnnnnnnnnnnnnnnnnnnnnnnnnnnnnnnnnnnnnnnnnnnnnnnnnnnnnnnnnnnnnnnnnnnnnnnnnnnnnnnnnnnnnnnnnnnnnnnnnnnnnnnnnnnnnnnnnnnnnnnnnnnnnnnnnnnnnnnnnnnnnnnnnnnnnnnnnnnnnnnnnnnnnnnnnnnnnnnnnnnnnnnnnnnnnnnnnnnnnnnnnnnnnnnnnnnnnnnnnnnnnnnnnnnnnnnnnnnnnnnnnnnnnnnnnnnnnnnnnnnnnnnnnnnnnnnnnnnnnnnnnnnnnnnnnnnnnnnnnnnnnnnnnnnnnnnnnnnnnnnnnnnnnnnnnnnnnnnnnnnnnnnnnnnnnnnnnnnnnnnnnnnnnnnnnnnnnnnnnnnnnnnnnnnnnnnnnnnnnnnnnnnnnnnnnnnnnnnnnnnnnnnnnnnnnnnnnnnnnnnnnnnnnnnnnnnnnnnnnnnnnnnnnnnnnnnnnnnnnnnnnnnnnnnnnnnnnnnnnnnnnnnnnnnnnnnnnnnnnnnnnnnnnnnnnnnnnnnnnnnnnnnnnnnnnnnnnnnnnnnnnnnnnnnnnnnnnnnnnnnnnnnnnnnnnnnnnnnnnnnnnnnnnnnnnnnnnnnnnnnnnnnnnnnnnnnnnnnnnnnnnnnnnnnnnnnnnnnnnnnnnnnnnnnnnnnnnnnnnnnnnnnnnnnnnnnnnnnnnnnnnnnnnnnnnnnnnnnnnnnnnnnnnnnnnnnnnnnnnnnnnnnnnnnnnnnnnnnnnnnnnnnnnnnnnnnnnnnnnnnnnnnnnnnnnnnnnnnnnnnnnnnnnnnnnnnnnnnnnnnnnnnnnnnnnnnnnnnnnnnnnnnnnnnnnnnnnnnnnnnnnnnnnnnnnnnnnnnnnnnnnnnnnnnnnnnnnnnnnnnnnnnnnnnnnnnnnnnnnnnnnnnnnnnnnnnnnnnnnnnnnnnnnnnnnnnnnnnnnnnnnnnnnnnnnnnnnnnnnnnnnnnnnnnnnnnnnnnnnnnnnnnnnnnnnnnnnnnnnnnnnnnnnnnnnnnnnnnnnnnnnnnnnnnnnnnnnnnnnnnnnnnnnnnnnnnnnnnnnnnnnnnnnnnnnnnnnnnnnnnnnnnnnnnnnnnnnnnnnnnnnnnnnnnnnnnnnnnnnnnnnnnnnnnnnnnnnnnnnnnnnnnnnnnnnnnnnnnnnnnnnnnnnnnnnnnnnnnnnnnnnnnnnnnnnnnnnnnnnnnnnnnnnnnnnnnnnnnnnnnnnnnnnnnnnnnnnnnnnnnnnnnnnnnnnnnnnnnnnnnnnnnnnnnnnnnnnnnnnnnnnnnnnnnnnnnnnnnnnnnnnnnnnnnnnnnnnnnnnnnnnnnnnnnnnnnnnnnnnnnnnnnnnnnnnnnnnnnnnnnnnnnnnnnnnnnnnnnnnnnnnnnnnnnnnnnnnnnnnnnnnnnnnnnnnnnnnnnnnnnnnnnnnnnnnnnnnnnnnnnnnnnnnnnnnnnnnnnnnnnnnnnnnnnnnnnnnnnnnnnnnnnnnnnnnnnnnnnnnnnnnnnnnnnnnnnnnnnnnnnnnnnnnnnnnnnnnnnnnnnnnnnnnnnnnnnnnnnnnnnnnnnnnnnnnnnnnnnnnnnnnnnnnnnnnnnnnnnnnnnnnnnnnnnnnnnnnnnnnnnnnnnnnnnnnnnnnnnnnnnnnnnnnnnnnnnnnnnnnnnnnnnnnnnnnnnnnnnnnnnnnnnnnnnnnnnnnnnnnnnnnnnnnnnnnnnnnnnnnnnnnnnnnnnnnnnnnnnnnnnnnnnnnnnnnnnnnnnnnnnnnnnnnnnnnnnnnnnnnnnnnnnnnnnnnnnnnnnnnnnnnnnnnnnnnnnnnnnnnnnnnnnnnnnnnnnnnnnnnnnnnnnnnnnnnnnnnnnnnnnnnnnnnnnnnnnnnnnnnnnnnnnnnnnnnnnnnnnnnnnnnnnnnnnnnnnnnnnnnnnnnnnnnnnnnnnnnnnnnnnnnnnnnnnnnnnnnnnnnnnnnnnnnnnnnnnnnnnnnnnnnnnnnnnnnnnnnnnnnnnnnnnnnnnnnnnnnnnnnnnnnnnnnnnnnnnnnnnnnnnnnnnnnnnnnnnnnnnnnnnnnnnnnnnnnnnnnnnnnnnnnnnnnnnnnnnnnnnnnnnnnnnnnnnnnnnnnnnnnnnnnnnnnnnnnnnnnnnnnnnnnnnnnnnnnnnnnnnnnnnnnnnnnnnnnnnnnnnnnnnnnnnnnnnnnnnnnnnnnnnnnnnnnnnnnnnnnnnnnnnnnnnnnnnnnnnnnnnnnnnnnnnnnnnnnnnnnnnnnnnnnnnnnnnnnnnnnnnnnnnnnnnnnnnnnnnnnnnnnnnnnnnnnnnnnnnnnnnnnnnnnnnnnnnnnnnnnnnnnnnnnnnnnnnnnnnnnnnnnnnnnnnnnnnnnnnnnnnnnnnnnnnnnnnnnnnnnnnnnnnnnnnnnnnnnnnnnnnnnnnnnnnnnnnnnnnnnnnnnnnnnnnnnnnnnnnnnnnnnnnnnnnnnnnnnnnnnnnnnnnnnnnnnnnnnnnnnnnnnnnnnnnnnnnnnnnnnnnnnnnnnnnnnnnnnnnnnnnnnnnnnnnnnnnnnnnnnnnnnnnnnnnnnnnnnnnnnnnnnnnnnnnnnnnnnnnnnnnnnnnnnnnnnnnnnnnnnnnnnnnnnnnnnnnnnnnnnnnnnnnnnnnnnnnnnnnnnnnnnnnnnnnnnnnnnnnnnnnnnnnnnnnnnnnnnnnnnnnnnnnnnnnnnnnnnnnnnnnnnnnnnnnnnnnnnnnnnnnnnnnnnnnnnnnnnnnnnnnnnnnnnnnnnnnnnnnnnnnnnnnnnnnnnnnnnnnnnnnnnnnnnnnnnnnnnnnnnnnnnnnnnnnnnnnnnnnnnnnnnnnnnnnnnnnnnnnnnnnnnnnnnnnnnnnnnnnnnnnnnnnnnnnnnnnnnnnnnnnnnnnnnnnnnnnnnnnnnnnnnnnnnnnnnnnnnnnnnnnnnnnnnnnnnnnnnnnnnnnnnnnnnnnnnnnnnnnnnnnnnnnnnnnnnnnnnnnnnnnnnnnnnnnnnnnnnnnnnnnnnnnnnnnnnnnnnnnnnnnnnnnnnnnnnnnnnnnnnnnnnnnnnnnnnnnnnnnnnnnnnnnnnnnnnnnnnnnnnnnnnnnnnnnnnnnnnnnnnnnnnnnnnnnnnnnnnnnnnnnnnnnnnnnnnnnnnnnnnnnnnnnnnnnnnnnnnnnnnnnnnnnnnnnnnnnnnnnnnnnnnnnnnnnnnnnnnnnnnnnnnnnnnnnnnnnnnnnnnnnnnnnnnnnnnnnnnnnnnnnnnnnnnnnnnnnnnnnnnnnnnnnnnnnnnnnnnnnnnnnnnnnnnnnnnnnnnnnnnnnnnnnnnnnnnnnnnnnnnnnnnnnnnnnnnnnnnnnnnnnnnnnnnnnnnnnnnnnnnnnnnnnnnnnnnnnnnnnnnnnnnnnnnnnnnnnnnnnnnnnnnnnnnnnnnnnnnnnnnnnnnnnnnnnnnnnnnnnnnnnnnnnnnnnnnnnnnnnnnnnnnnnnnnnnnnnnnnnnnnnnnnnnnnnnnnnnnnnnnnnnnnnnnnnnnnnnnnnnnnnnnnnnnnnnnnnnnnnnnnnnnnnnnnnnnnnnnnnnnnnnnnnnnnnnnnnnnnnnnnnnnnnnnnnnnnnnnnnnnnnnnnnnnnnnnnnnnnnnnnnnnnnnnnnnnnnnnnnnnnnnnnnnnnnnnnnnnnnnnnnnnnnnnnnnnnnnnnnnnnnnnnnnnnnnnnnnnnnnnnnnnnnnnnnnnnnnnnnnnnnnnnnnnnnnnnnnnnnnnnnnnnnnnnnnnnnnnnnnnnnnnnnnnnnnnnnnnnnnnnnnnnnnnnnnnnnnnnnnnnnnnnnnnnnnnnnnnnnnnnnnnnnnnnnnnnnnnnnnnnnnnnnnnnnnnnnnnnnnnnnnnnnnnnnnnnnnnnnnnnnnnnnnnnnnnnnnnnnnnnnnnnnnnnnnnnnnnnnnnnnnnnnnnnnnnnnnnnnnnnnnnnnnnnnnnnnnnnnnnnnnnnnnnnnnnnnnnnnnnnnnnnnnnnnnnnnnnnnnnnnnnnnnnnnnnnnnnnnnnnnnnnnnnnnnnnnnnnnnnnnnnnnnnnnnnnnnnnnnnnnnnnnnnnnnnnnnnnnnnnnnnnnnnnnnnnnnnnnnnnnnnnnnnnnnnnnnnnnnnnnnnnnnnnnnnnnnnnnnnnnnnnnnnnnnnnnnnnnnnnnnnnnnnnnnnnnnnnnnnnnnnnnnnnnnnnnnnnnnnnnnnnnnnnnnnnnnnnnnnnnnnnnnnnnnnnnnnnnnnnnnnnnnnnnnnnnnnnnnnnnnnnnnnnnnnnnnnnnnnnnnnnnnnnnnnnnnnnnnnnnnnnnnnnnnnnnnnnnnnnnnnnnnnnnnnnnnnnnnnnnnnnnnnnnnnnnnnnnnnnnnnnnnnnnnnnnnnnnnnnnnnnnnnnnnnnnnnnnnnnnnnnnnnnnnnnnnnnnnnnnnnnnnnnnnnnnnnnnnnnnnnnnnnnnnnnnnnnnnnnnnnnnnnnnnnnnnnnnnnnnnnnnnnnnnnnnnnnnnnnnnnnnnnnnnnnnnnnnnnnnnnnnnnnnnnnnnnnnnnnnnnnnnnnnnnnnnnnnnnnnnnnnnnnnnnnnnnnnnnnnnnnnnnnnnnnnnnnnnnnnnnnnnnnnnnnnnnnnnnnnnnnnnnnnnnnnnnnnnnnnnnnnnnnnnnnnnnnnnnnnnnnnnnnnnnnnnnnnnnnnnnnnnnnnnnnnnnnnnnnnnnnnnnnnnnnnnnnnnnnnnnnnnnnnnnnnnnnnnnnnnnnnnnnnnnnnnnnnnnnnnnnnnnnnnnnnnnnnnnnnnnnnnnnnnnnnnnnnnnnnnnnnnnnnnnnnnnnnnnnnnnnnnnnnnnnnnnnnnnnnnnnnnnnnnnnnnnnnnnnnnnnnnnnnnnnnnnnnnnnnnnnnnnnnnnnnnnnnnnnnnnnnnnnnnnnnnnnnnnnnnnnnnnnnnnnnnnnnnnnnnnnnnnnnnnnnnnnnnnnnnnnnnnnnnnnnnnnnnnnnnnnnnnnnnnnnnnnnnnnnnnnnnnnnnnnnnnnnnnnnnnnnnnnnnnnnnnnnnnnnnnnnnnnnnnnnnnnnnnnnnnnnnnnnnnnnnnnnnnnnnnnnnnnnnnnnnnnnnnnnnnnnnnnnnnnnnnnnnnnnnnnnnnnnnnnnnnnnnnnnnnnnnnnnnnnnnnnnnnnnnnnnnnnnnnnnnnnnnnnnnnnnnnnnnnnnnnnnnnnnnnnnnnnnnnnnnnnnnnnnnnnnnnnnnnnnnnnnnnnnnnnnnnnnnnnnnnnnnnnnnnnnnnnnnnnnnnnnnnnnnnnnnnnnnnnnnnnnnnnnnnnnnnnnnnnnnnnnnnnnnnnnnnnnnnnnnnnnnnnnnnnnnnnnnnnnnnnnnnnnnnnnnnnnnnnnnnnnnnnnnnnnnnnnnnnnnnnnnnnnnnnnnnnnnnnnnnnnnnnnnnnnnnnnnnnnnnnnnnnnnnnnnnnnnnnnnnnnnnnnnnnnnnnnnnnnnnnnnnnnnnnnnnnnnnnnnnnnnnnnnnnnnnnnnnnnnnnnnnnnnnnnnnnnnnnnnnnnnnnnnnnnnnnnnnnnnnnnnnnnnnnnnnnnnnnnnnnnnnnnnnnnnnnnnnnnnnnnnnnnnnnnnnnnnnnnnnnnnnnnnnnnnnnnnnnnnnnnnnnnnnnnnnnnnnnnnnnnnnnnnnnnnnnnnnnnnnnnnnnnnnnnnnnnnnnnnnnnnnnnnnnnnnnnnnnnnnnnnnnnnnnnnnnnnnnnnnnnnnnnnnnnnnnnnnnnnnnnnnnnnnnnnnnnnnnnnnnnnnnnnnnnnnnnnnnnnnnnnnnnnnnnnnnnnnnnnnnnnnnnnnnnnnnnnnnnnnnnnnnnnnnnnnnnnnnnnnnnnnnnnnnnnnnnnnnnnnnnnnnnnnnnnnnnnnnnnnnnnnnnnnnnnnnnnnnnnnnnnnnnnnnnnnnnnnnnnnnnnnnnnnnnnnnnnnnnnnnnnnnnnnnnnnnnnnnnnnnnnnnnnnnnnnnnnnnnnnnnnnnnnnnnnnnnnnnnnnnnnnnnnnnnnnnnnnnnnnnnnnnnnnnnnnnnnnnnnnnnnnnnnnnnnnnnnnnnnnnnnnnnnnnnnnnnnnnnnnnnnnnnnnnnnnnnnnnnnnnnnnnnnnnnnnnnnnnnnnnnnnnnnnnnnnnnnnnnnnnnnnnnnnnnnnnnnnnnnnnnnnnnnnnnnnnnnnnnnnnnnnnnnnnnnnnnnnnnnnnnnnnnnnnnnnnnnnnnnnnnnnnnnnnnnnnnnnnnnnnnnnnnnnnnnnnnnnnnnnnnnnnnnnnnnnnnnnnnnnnnnnnnnnnnnnnnnnnnnnnnnnnnnnnnnnnnnnnnnnnnnnnnnnnnnnnnnnnnnnnnnnnnnnnnnnnnnnnnnnnnnnnnnnnnnnnnnnnnnnnnnnnnnnnnnnnnnnnnnnnnnnnnnnnnnnnnnnnnnnnnnnnnnnnnnnnnnnnnnnnnnnnnnnnnnnnnnnnnnnnnnnnnnnnnnnnnnnnnnnnnnnnnnnnnnnnnnnnnnnnnnnnnnnnnnnnnnnnnnnnnnnnnnnnnnnnnnnnnnnnnnnnnnnnnnnnnnnnnnnnnnnnnnnnnnnnnnnnnnnnnnnnnnnnnnnnnnnnnnnnnnnnnnnnnnnnnnnnnnnnnnnnnnnnnnnnnnnnnnnnnnnnnnnnnnnnnnnnnnnnnnnnnnnnnnnnnnnnnnnnnnnnnnnnnnnnnnnnnnnnnnnnnnnnnnnnnnnnnnnnnnnnnnnnnnnnnnnnnnnnnnnnnnnnnnnnnnnnnnnnnnnnnnnnnnnnnnnnnnnnnnnnnnnnnnnnnnnnnnnnnnnnnnnnnnnnnnnnnnnnnnnnnnnnnnnnnnnnnnnnnnnnnnnnnnnnnnnnnnnnnnnnnnnnnnnnnnnnnnnnnnnnnnnnnnnnnnnnnnnnnnnnnnnnnnnnnnnnnnnnnnnnnnnnnnnnnnnnnnnnnnnnnnnnnnnnnnnnnnnnnnnnnnnnnnnnnnnnnnnnnnnnnnnnnnnnnnnnnnnnnnnnnnnnnnnnnnnnnnnnnnnnnnnnnnnnnnnnnnnnnnnnnnnnnnnnnnnnnnnnnnnnnnnnnnnnnnnnnnnnnnnnnnnnnnnnnnnnnnnnnnnnnnnnnnnnnnnnnnnnnnnnnnnnnnnnnnnnnnnnnnnnnnnnnnnnnnnnnnnnnnnnnnnnnnnnnnnnnnnnnnnnnnnnnnnnnnnnnnnnnnnnnnnnnnnnnnnnnnnnnnnnnnnnnnnnnnnnnnnnnnnnnnnnnnnnnnnnnnnnnnnnnnnnnnnnnnnnnnnnnnnnnnnnnnnnnnnnnnnnnnnnnnnnnnnnnnnnnnnnnnnnnnnnnnnnnnnnnnnnnnnnnnnnnnnnnnnnnnnnnnnnnnnnnnnnnnnnnnnnnnnnnnnnnnnnnnnnnnnnnnnnnnnnnnnnnnnnnnnnnnnnnnnnnnnnnnnnnnnnnnnnnnnnnnnnnnnnnnnnnnnnnnnnnnnnnnnnnnnnnnnnnnnnnnnnnnnnnnnnnnnnnnnnnnnnnnnnnnnnnnnnnnnnnnnnnnnnnnnnnnnnnnnnnnnnnnnnnnnnnnnnnnnnnnnnnnnnnnnnnnnnnnnnnnnnnnnnnnnnnnnnnnnnnnnnnnnnnnnnnnnnnnnnnnnnnnnnnnnnnnnnnnnnnnnnnnnnnnnnnnnnnnnnnnnnnnnnnnnnnnnnnnnnnnnnnnnnnnnnnnnnnnnnnnnnnnnnnnnnnnnnnnnnnnnnnnnnnnnnnnnnnnnnnnnnnnnnnnnnnnnnnnnnnnnnnnnnnnnnnnnnnnnnnnnnnnnnnnnnnnnnnnnnnnnnnnnnnnnnnnnnnnnnnnnnnnnnnnnnnnnnnnnnnnnnnnnnnnnnnnnnnnnnnnnnnnnnnnnnnnnnnnnnnnnnnnnnnnnnnnnnnnnnnnnnnnnnnnnnnnnnnnnnnnnnnnnnnnnnnnnnnnnnnnnnnnnnnnnnnnnnnnnnnnnnnnnnnnnnnnnnnnnnnnnnnnnnnnnnnnnnnnnnnnnnnnnnnnnnnnnnnnnnnnnnnnnnnnnnnnnnnnnnnnnnnnnnnnnnnnnnnnnnnnnnnnnnnnnnnnnnnnnnnnnnnnnnnnnnnnnnnnnnnnnnnnnnnnnnnnnnnnnnnnnnnnnnnnnnnnnnnnnnnnnnnnnnnnnnnnnnnnnnnnnnnnnnnnnnnnnnnnnnnnnnnnnnnnnnnnnnnnnnnnnnnnnnnnnnnnnnnnnnnnnnnnnnnnnnnnnnnnnnnnnnnnnnnnnnnnnnnnnnnnnnnnnnnnnnnnnnnnnnnnnnnnnnnnnnnnnnnnnnnnnnnnnnnnnnnnnnnnnnnnnnnnnnnnnnnnnnnnnnnnnnnnnnnnnnnnnnnnnnnnnnnnnnnnnnnnnnnnnnnnnnnnnnnnnnnnnnnnnnnnnnnnnnnnnnnnnnnnnnnnnnnnnnnnnnnnnnnnnnnnnnnnnnnnnnnnnnnnnnnnnnnnnnnnnnnnnnnnnnnnnnnnnnnnnnnnnnnnnnnnnnnnnnnnnnnnnnnnnnnnnnnnnnnnnnnnnnnnnnnnnnnnnnnnnnnnnnnnnnnnnnnnnnnnnnnnnnnnnnnnnnnnnnnnnnnnnnnnnnnnnnnnnnnnnnnnnnnnnnnnnnnnnnnnnnnnnnnnnnnnnnnnnnnnnnnnnnnnnnnnnnnnnnnnnnnnnnnnnnnnnnnnnnnnnnnnnnnnnnnnnnnnnnnnnnnnnnnnnnnnnnnnnnnnnnnnnnnnnnnnnnnnnnnnnnnnnnnnnnnnnnnnnnnnnnnnnnnnnnnnnnnnnnnnnnnnnnnnnnnnnnnnnnnnnnnnnnnnnnnnnnnnnnnnnnnnnnnnnnnnnnnnnnnnnnnnnnnnnnnnnnnnnnnnnnnnnnnnnnnnnnnnnnnnnnnnnnnnnnnnnnnnnnnnnnnnnnnnnnnnnnnnnnnnnnnnnnnnnnnnnnnnnnnnnnnnnnnnnnnnnnnnnnnnnnnnnnnnnnnnnnnnnnnnnnnnnnnnnnnnnnnnnnnnnnnnnnnnnnnnnnnnnnnnnnnnnnnnnnnnnnnnnnnnnnnnnnnnnnnnnnnnnnnnnnnnnnnnnnnnnnnnnnnnnnnnnnnnnnnnnnnnnnnnnnnnnnnnnnnnnnnnnnnnnnnnnnnnnnnnnnnnnnnnnnnnnnnnnnnnnnnnnnnnnnnnnnnnnnnnnnnnnnnnnnnnnnnnnnnnnnnnnnnnnnnnnnnnnnnnnnnnnnnnnnnnnnnnnnnnnnnnnnnnnnnnnnnnnnnnnnnnnnnnnnnnnnnnnnnnnnnnnnnnnnnnnnnnnnnnnnnnnnnnnnnnnnnnnnnnnnnnnnnnnnnnnnnnnnnnnnnnnnnnnnnnnnnnnnnnnnnnnnnnnnnnnnnnnnnnnnnnnnnnnnnnnnnnnnnnnnnnnnnnnnnnnnnnnnnnnnnnnnnnnnnnnnnnnnnnnnnnnnnnnnnnnnnnnnnnnnnnnnnnnnnnnnnnnnnnnnnnnnnnnnnnnnnnnnnnnnnnnnnnnnnnnnnnnnnnnnnnnnnnnnnnnnnnnnnnnnnnnnnnnnnnnnnnnnnnnnnnnnnnnnnnnnnnnnnnnnnnnnnnnnnnnnnnnnnnnnnnnnnnnnnnnnnnnnnnnnnnnnnnnnnnnnnnnnnnnnnnnnnnnnnnnnnnnnnnnnnnnnnnnnnnnnnnnnnnnnnnnnnnnnnnnnnnnnnnnnnnnnnnnnnnnnnnnnnnnnnnnnnnnnnnnnnnnnnnnnnnnnnnnnnnnnnnnnnnnnnnnnnnnnnnnnnnnnnnnnnnnnnnnnnnnnnnnnnnnnnnnnnnnnnnnnnnnnnnnnnnnnnnnnnnnnnnnnnnnnnnnnnnnnnnnnnnnnnnnnnnnnnnnnnnnnnnnnnnnnnnnnnnnnnnnnnnnnnnnnnnnnnnnnnnnnnnnnnnnnnnnnnnnnnnnnnnnnnnnnnnnnnnnnnnnnnnnnnnnnnnnnnnnnnnnnnnnnnnnnnnnnnnnnnnnnnnnnnnnnnnnnnnnnnnnnnnnnnnnnnnnnnnnnnnnnnnnnnnnnnnnnnnnnnnnnnnnnnnnnnnnnnnnnnnnnnnnnnnnnnnnnnnnnnnnnnnnnnnnnnnnnnnnnnnnnnnnnnnnnnnnnnnnnnnnnnnnnnnnnnnnnnnnnnnnnnnnnnnnnnnnnnnnnnnnnnnnnnnnnnnnnnnnnnnnnnnnnnnnnnnnnnnnnnnnnnnnnnnnnnnnnnnnnnnnnnnnnnnnnnnnnnnnnnnnnnnnnnnnnnnnnnnnnnnnnnnnnnnnnnnnnnnnnnnnnnnnnnnnnnnnnnnnnnnnnnnnnnnnnnnnnnnnnnnnnnnnnnnnnnnnnnnnnnnnnnnnnnnnnnnnnnnnnnnnnnnnnnnnnnnnnnnnnnnnnnnnnnnnnnnnnnnnnnnnnnnnnnnnnnnnnnnnnnnnnnnnnnnnnnnnnnnnnnnnnnnnnnnnnnnnnnnnnnnnnnnnnnnnnnnnnnnnnnnnnnnnnnnnnnnnnnnnnnnnnnnnnnnnnnnnnnnnnnnnnnnnnnnnnnnnnnnnnnnnnnnnnnnnnnnnnnnnnnnnnnnnnnnnnnnnnnnnnnnnnnnnnnnnnnnnnnnnnnnnnnnnnnnnnnnnnnnnnnnnnnnnnnnnnnnnnnnnnnnnnnnnnnnnnnnnnnnnnnnnnnnnnnnnnnnnnnnnnnnnnnnnnnnnnnnnnnnnnnnnnnnnnnnnnnnnnnnnnnnnnnnnnnnnnnnnnnnnnnnnnnnnnnnnnnnnnnnnnnnnnnnnnnnnnnnnnnnnnnnnnnnnnnnnnnnnnnnnnnnnnnnnnnnnnnnnnnnnnnnnnnnnnnnnnnnnnnnnnnnnnnnnnnnnnnnnnnnnnnnnnnnnnnnnnnnnnnnnnnnnnnnnnnnnnnnnnnnnnnnnnnnnnnnnnnnnnnnnnnnnnnnnnnnnnnnnnnnnnnnnnnnnnnnnnnnnnnnnnnnnnnnnnnnnnnnnnnnnnnnnnnnnnnnnnnnnnnnnnnnnnnnnnnnnnnnnnnnnnnnnnnnnnnnnnnnnnnnnnnnnnnnnnnnnnnnnnnnnnnnnnnnnnnnnnnnnnnnnnnnnnnnnnnnnnnnnnnnnnnnnnnnnnnnnnnnnnnnnnnnnnnnnnnnnnnnnnnnnnnnnnnnnnnnnnnnnnnnnnnnnnnnnnnnnnnnnnnnnnnnnnnnnnnnnnnnnnnnnnnnnnnnnnnnnnnnnnnnnnnnnnnnnnnnnnnnnnnnnnnnnnnnnnnnnnnnnnnnnnnnnnnnnnnnnnnnnnnnnnnnnnnnnnnnnnnnnnnnnnnnnnnnnnnnnnnnnnnnnnnnnnnnnnnnnnnnnnnnnnnnnnnnnnnnnnnnnnnnnnnnnnnnnnnnnnnnnnnnnnnnnnnnnnnnnnnnnnnnnnnnnnnnnnnnnnnnnnnnnnnnnnnnnnnnnnnnnnnnnnnnnnnnnnnnnnnnnnnnnnnnnnnnnnnnnnnnnnnnnnnnnnnnnnnnnnnnnnnnnnnnnnnnnnnnnnnnnnnnnnnnnnnnnnnnnnnnnnnnnnnnnnnnnnnnnnnnnnnnnnnnnnnnnnnnnnnnnnnnnnnnnnnnnnnnnnnnnnnnnnnnnnnnnnnnnnnnnnnnnnnnnnnnnnnnnnnnnnnnnnnnnnnnnnnnnnnnnnnnnnnnnnnnnnnnnnnnnnnnnnnnnnnnnnnnnnnnnnnnnnnnnnnnnnnnnnnnnnnnnnnnnnnnnnnnnnnnnnnnnnnnnnnnnnnnnnnnnnnnnnnnnnnnnnnnnnnnnnnnnnnnnnnnnnnnnnnnnnnnnnnnnnnnnnnnnnnnnnnnnnnnnnnnnnnnnnnnnnnnnnnnnnnnnnnnnnnnnnnnnnnnnnnnnnnnnnnnnnnnnnnnnnnnnnnnnnnnnnnnnnnnnnnnnnnnnnnnnnnnnnnnnnnnnnnnnnnnnnnnnnnnnnnnnnnnnnnnnnnnnnnnnnnnnnnnnnnnnnnnnnnnnnnnnnnnnnnnnnnnnnnnnnnnnnnnnnnnnnnnnnnnnnnnnnnnnnnnnnnnnnnnnnnnnnnnnnnnnnnnnnnnnnnnnnnnnnnnnnnnnnnnnnnnnnnnnnnnnnnnnnnnnnnnnnnnnnnnnnnnnnnnnnnnnnnnnnnnnnnnnnnnnnnnnnnnnnnnnnnnnnnnnnnnnnnnnnnnnnnnnnnnnnnnnnnnnnnnnnnnnnnnnnnnnnnnnnnnnnnnnnnnnnnnnnnnnnnnnnnnnnnnnnnnnnnnnnnnnnnnnnnnnnnnnnnnnnnnnnnnnnnnnnnnnnnnnnnnnnnnnnnnnnnnnnnnnnnnnnnnnnnnnnnnnnnnnnnnnnnnnnnnnnnnnnnnnnnnnnnnnnnnnnnnnnnnnnnnnnnnnnnnnnnnnnnnnnnnnnnnnnnnnnnnnnnnnnnnnnnnnnnnnnnnnnnnnnnnnnnnnnnnnnnnnnnnnnnnnnnnnnnnnnnnnnnnnnnnnnnnnnnnnnnnnnnnnnnnnnnnnnnnnnnnnnnnnnnnnnnnnnnnnnnnnnnnnnnnnnnnnnnnnnnnnnnnnnnnnnnnnnnnnnnnnnnnnnnnnnnnnnnnnnnnnnnnnnnnnnnnnnnnnnnnnnnnnnnnnnnnnnnnnnnnnnnnnnnnnnnnnnnnnnnnnnnnnnnnnnnnnnnnnnnnnnnnnnnnnnnnnnnnnnnnnnnnnnnnnnnnnnnnnnnnnnnnnnnnnnnnnnnnnnnnnnnnnnnnnnnnnnnnnnnnnnnnnnnnnnnnnnnnnnnnnnnnnnnnnnnnnnnnnnnnnnnnnnnnnnnnnnnnnnnnnnnnnnnnnnnnnnnnnnnnnnnnnnnnnnnnnnnnnnnnnnnnnnnnnnnnnnnnnnnnnnnnnnnnnnnnnnnnnnnnnnnnnnnnnnnnnnnnnnnnnnnnnnnnnnnnnnnnnnnnnnnnnnnnnnnnnnnnnnnnnnnnnnnnnnnnnnnnnnnnnnnnnnnnnnnnnnnnnnnnnnnnnnnnnnnnnnnnnnnnnnnnnnnnnnnnnnnnnnnnnnnnnnnnnnnnnnnnnnnnnnnnnnnnnnnnnnnnnnnnnnnnnnnnnnnnnnnnnnnnnnnnnnnnnnnnnnnnnnnnnnnnnnnnnnnnnnnnnnnnnnnnnnnnnnnnnnnnnnnnnnnnnnnnnnnnnnnnnnnnnnnnnnnnnnnnnnnnnnnnnnnnnnnnnnnnnnnnnnnnnnnnnnnnnnnnnnnnnnnnnnnnnnnnnnnnnnnnnnnnnnnnnnnnnnnnnnnnnnnnnnnnnnnnnnnnnnnnnnnnnnnnnnnnnnnnnnnnnnnnnnnnnnnnnnnnnnnnnnnnnnnnnnnnnnnnnnnnnnnnnnnnnnnnnnnnnnnnnnnnnnnnnnnnnnnnnnnnnnnnnnnnnnnnnnnnnnnnnnnnnnnnnnnnnnnnnnnnnnnnnnnnnnnnnnnnnnnnnnnnnnnnnnnnnnnnnnnnnnnnnnnnnnnnnnnnnnnnnnnnnnnnnnnnnnnnnnnnnnnnnnnnnnnnnnnnnnnnnnnnnnnnnnnnnnnnnnnnnnnnnnnnnnnnnnnnnnnnnnnnnnnnnnnnnnnnnnnnnnnnnnnnnnnnnnnnnnnnnnnnnnnnnnnnnnnnnnnnnnnnnnnnnnnnnnnnnnnnnnnnnnnnnnnnnnnnnnnnnnnnnnnnnnnnnnnnnnnnnnnnnnnnnnnnnnnnnnnnnnnnnnnnnnnnnnnnnnnnnnnnnnnnnnnnnnnnnnnnnnnnnnnnnnnnnnnnnnnnnnnnnnnnnnnnnnnnnnnnnnnnnnnnnnnnnnnnnnnnnnnnnnnnnnnnnnnnnnnnnnnnnnnnnnnnnnnnnnnnnnnnnnnnnnnnnnnnnnnnnnnnnnnnnnnnnnnnnnnnnnnnnnnnnnnnnnnnnnnnnnnnnnnnnnnnnnnnnnnnnnnnnnnnnnnnnnnnnnnnnnnnnnnnnnnnnnnnnnnnnnnnnnnnnnnnnnnnnnnnnnnnnnnnnnnnnnnnnnnnnnnnnnnnnnnnnnnnnnnnnnnnnnnnnnnnnnnnnnnnnnnnnnnnnnnnnnnnnnnnnnnnnnnnnnnnnnnnnnnnnnnnnnnnnnnnnnnnnnnnnnnnnnnnnnnnnnnnnnnnnnnnnnnnnnnnnnnnnnnnnnnnnnnnnnnnnnnnnnnnnnnnnnnnnnnnnnnnnnnnnnnnnnnnnnnnnnnnnnnnnnnnnnnnnnnnnnnnnnnnnnnnnnnnnnnnnnnnnnnnnnnnnnnnnnnnnnnnnnnnnnnnnnnnnnnnnnnnnnnnnnnnnnnnnnnnnnnnnnnnnnnnnnnnnnnnnnnnnnnnnnnnnnnnnnnnnnnnnnnnnnnnnnnnnnnnnnnnnnnnnnnnnnnnnnnnnnnnnnnnnnnnnnnnnnnnnnnnnnnnnnnnnnnnnnnnnnnnnnnnnnnnnnnnnnnnnnnnnnnnnnnnnnnnnnnnnnnnnnnnnnnnnnnnnnnnnnnnnnnnnnnnnnnnnnnnnnnnnnnnnnnnnnnnnnnnnnnnnnnnnnnnnnnnnnnnnnnnnnnnnnnnnnnnnnnnnnnnnnnnnnnnnnnnnnnnnnnnnnnnnnnnnnnnnnnnnnnnnnnnnnnnnnnnnnnnnnnnnnnnnnnnnnnnnnnnnnnnnnnnnnnnnnnnnnnnnnnnnnnnnnnnnnnnnnnnnnnnnnnnnnnnnnnnnnnnnnnnnnnnnnnnnnnnnnnnnnnnnnnnnnnnnnnnnnnnnnnnnnnnnnnnnnnnnnnnnnnnnnnnnnnnnnnnnnnnnnnnnnnnnnnnnnnnnnnnnnnnnnnnnnnnnnnnnnnnnnnnnnnnnnnnnnnnnnnnnnnnnnnnnnnnnnnnnnnnnnnnnnnnnnnnnnnnnnnnnnnnnnnnnnnnnnnnnnnnnnnnnnnnnnnnnnnnnnnnnnnnnnnnnnnnnnnnnnnnnnnnnnnnnnnnnnnnnnnnnnnnnnnnnnnnnnnnnnnnnnnnnnnnnnnnnnnnnnnnnnnnnnnnnnnnnnnnnnnnnnnnnnnnnnnnnnnnnnnnnnnnnnnnnnnnnnnnnnnnnnnnnnnnnnnnnnnnnnnnnnnnnnnnnnnnnnnnnnnnnnnnnnnnnnnnnnnnnnnnnnnnnnnnnnnnnnnnnnnnnnnnnnnnnnnnnnnnnnnnnnnnnnnnnnnnnnnnnnnnnnnnnnnnnnnnnnnnnnnnnnnnnnnnnnnnnnnnnnnnnnnnnnnnnnnnnnnnnnnnnnnnnnnnnnnnnnnnnnnnnnnnnnnnnnnnnnnnnnnnnnnnnnnnnnnnnnnnnnnnnnnnnnnnnnnnnnnnnnnnnnnnnnnnnnnnnnnnnnnnnnnnnnnnnnnnnnnnnnnnnnnnnnnnnnnnnnnnnnnnnnnnnnnnnnnnnnnnnnnnnnnnnnnnnnnnnnnnnnnnnnnnnnnnnnnnnnnnnnnnnnnnnnnnnnnnnnnnnnnnnnnnnnnnnnnnnnnnnnnnnnnnnnnnnnnnnnnnnnnnnnnnnnnnnnnnnnnnnnnnnnnnnnnnnnnnnnnnnnnnnnnnnnnnnnnnnnnnnnnnnnnnnnnnnnnnnnnnnnnnnnnnnnnnnnnnnnnnnnnnnnnnnnnnnnnnnnnnnnnnnnnnnnnnnnnnnnnnnnnnnnnnnnnnnnnnnnnnnnnnnnnnnnnnnnnnnnnnnnnnnnnnnnnnnnnnnnnnnnnnnnnnnnnnnnnnnnnnnnnnnnnnnnnnnnnnnnnnnnnnnnnnnnnnnnnnnnnnnnnnnnnnnnnnnnnnnnnnnnnnnnnnnnnnnnnnnnnnnnnnnnnnnnnnnnnnnnnnnnnnnnnnnnnnnnnnnnnnnnnnnnnnnnnnnnnnnnnnnnnnnnnnnnnnnnnnnnnnnnnnnnnnnnnnnnnnnnnnnnnnnnnnnnnnnnnnnnnnnnnnnnnnnnnnnnnnnnnnnnnnnnnnnnnnnnnnnnnnnnnnnnnnnnnnnnnnnnnnnnnnnnnnnnnnnnnnnnnnnnnnnnnnnnnnnnnnnnnnnnnnnnnnnnnnnnnnnnnnnnnnnnnnnnnnnnnnnnnnnnnnnnnnnnnnnnnnnnnnnnnnnnnnnnnnnnnnnnnnnnnnnnnnnnnnnnnnnnnnnnnnnnnnnnnnnnnnnnnnnnnnnnnnnnnnnnnnnnnnnnnnnnnnnnnnnnnnnnnnnnnnnnnnnnnnnnnnnnnnnnnnnnnnnnnnnnnnnnnnnnnnnnnnnnnnnnnnnnnnnnnnnnnnnnnnnnnnnnnnnnnnnnnnnnnnnnnnnnnnnnnnnnnnnnnnnnnnnnnnnnnnnnnnnnnnnnnnnnnnnnnnnnnnnnnnnnnnnnnnnnnnnnnnnnnnnnnnnnnnnnnnnnnnnnnnnnnnnnnnnnnnnnnnnnnnnnnnnnnnnnnnnnnnnnnnnnnnnnnnnnnnnnnnnnnnnnnnnnnnnnnnnnnnnnnnnnnnnnnnnnnnnnnnnnnnnnnnnnnnnnnnnnnnnnnnnnnnnnnnnnnnnnnnnnnnnnnnnnnnnnnnnnnnnnnnnnnnnnnnnnnnnnnnnnnnnnnnnnnnnnnnnnnnnnnnnnnnnnnnnnnnnnnnnnnnnnnnnnnnnnnnnnnnnnnnnnnnnnnnnnnnnnnnnnnnnnnnnnnnnnnnnnnnnnnnnnnnnnnnnnnnnnnnnnnnnnnnnnnnnnnnnnnnnnnnnnnnnnnnnnnnnnnnnnnnnnnnnnnnnnnnnnnnnnnnnnnnnnnnnnnnnnnnnnnnnnnnnnnnnnnnnnnnnnnnnnnnnnnnnnnnnnnnnnnnnnnnnnnnnnnnnnnnnnnnnnnnnnnnnnnnnnnnnnnnnnnnnnnnnnnnnnnnnnnnnnnnnnnnnnnnnnnnnnnnnnnnnnnnnnnnnnnnnnnnnnnnnnnnnnnnnnnnnnnnnnnnnnnnnnnnnnnnnnnnnnnnnnnnnnnnnnnnnnnnnnnnnnnnnnnnnnnnnnnnnnnnnnnnnnnnnnnnnnnnnnnnnnnnnnnnnnnnnnnnnnnnnnnnnnnnnnnnnnnnnnnnnnnnnnnnnnnnnnnnnnnnnnnnnnnnnnnnnnnnnnnnnnnnnnnnnnnnnnnnnnnnnnnnnnnnnnnnnnnnnnnnnnnnnnnnnnnnnnnnnnnnnnnnnnnnnnnnnnnnnnnnnnnnnnnnnnnnnnnnnnnnnnnnnnnnnnnnnnnnnnnnnnnnnnnnnnnnnnnnnnnnnnnnnnnnnnnnnnnnnnnnnnnnnnnnnnnnnnnnnnnnnnnnnnnnnnnnnnnnnnnnnnnnnnnnnnnnnnnnnnnnnnnnnnnnnnnnnnnnnnnnnnnnnnnnnnnnnnnnnnnnnnnnnnnnnnnnnnnnnnnnnnnnnnnnnnnnnnnnnnnnnnnnnnnnnnnnnnnnnnnnnnnnnnnnnnnnnnnnnnnnnnnnnnnnnnnnnnnnnnnnnnnnnnnnnnnnnnnnnnnnnnnnnnnnnnnnnnnnnnnnnnnnnnnnnnnnnnnnnnnnnnnnnnnnnnnnnnnnnnnnnnnnnnnnnnnnnnnnnnnnnnnnnnnnnnnnnnnnnnnnnnnnnnnnnnnnnnnnnnnnnnnnnnnnnnnnnnnnnnnnnnnnnnnnnnnnnnnnnnnnnnnnnnnnnnnnnnnnnnnnnnnnnnnnnnnnnnnnnnnnnnnnnnnnnnnnnnnnnnnnnnnnnnnnnnnnnnnnnnnnnnnnnnnnnnnnnnnnnnnnnnnnnnnnnnnnnnnnnnnnnnnnnnnnnnnnnnnnnnnnnnnnnnnnnnnnnnnnnnnnnnnnnnnnnnnnnnnnnnnnnnnnnnnnnnnnnnnnnnnnnnnnnnnnnnnnnnnnnnnnnnnnnnnnnnnnnnnnnnnnnnnnnnnnnnnnnnnnnnnnnnnnnnnnnnnnnnnnnnnnnnnnnnnnnnnnnnnnnnnnnnnnnnnnnnnnnnnnnnnnnnnnnnnnnnnnnnnnnnnnnnnnnnnnnnnnnnnnnnnnnnnnnnnnnnnnnnnnnnnnnnnnnnnnnnnnnnnnnnnnnnnnnnnnnnnnnnnnnnnnnnnnnnnnnnnnnnnnnnnnnnnnnnnnnnnnnnnnnnnnnnnnnnnnnnnnnnnnnnnnnnnnnnnnnnnnnnnnnnnnnnnnnnnnnnnnnnnnnnnnnnnnnnnnnnnnnnnnnnnnnnnnnnnnnnnnnnnnnnnnnnnnnnnnnnnnnnnnnnnnnnnnnnnnnnnnnnnnnnnnnnnnnnnnnnnnnnnnnnnnnnnnnnnnnnnnnnnnnnnnnnnnnnnnnnnnnnnnnnnnnnnnnnnnnnnnnnnnnnnnnnnnnnnnnnnnnnnnnnnnnnnnnnnnnnnnnnnnnnnnnnnnnnnnnnnnnnnnnnnnnnnnnnnnnnnnnnnnnnnnnnnnnnnnnnnnnnnnnnnnnnnnnnnnnnnnnnnnnnnnnnnnnnnnnnnnnnnnnnnnnnnnnnnnnnnnnnnnnnnnnnnnnnnnnnnnnnnnnnnnnnnnnnnnnnnnnnnnnnnnnnnnnnnnnnnnnnnnnnnnnnnnnnnnnnnnnnnnnnnnnnnnnnnnnnnnnnnnnnnnnnnnnnnnnnnnnnnnnnnnnnnnnnnnnnnnnnnnnnnnnnnnnnnnnnnnnnnnnnnnnnnnnnnnnnnnnnnnnnnnnnnnnnnnnnnnnnnnnnnnnnnnnnnnnnnnnnnnnnnnnnnnnnnnnnnnnnnnnnnnnnnnnnnnnnnnnnnnnnnnnnnnnnnnnnnnnnnnnnnnnnnnnnnnnnnnnnnnnnnnnnnnnnnnnnnnnnnnnnnnnnnnnnnnnnnnnnnnnnnnnnnnnnnnnnnnnnnnnnnnnnnnnnnnnnnnnnnnnnnnnnnnnnnnnnnnnnnnnnnnnnnnnnnnnnnnnnnnnnnnnnnnnnnnnnnnnnnnnnnnnnnnnnnnnnnnnnnnnnnnnnnnnnnnnnnnnnnnnnnnnnnnnnnnnnnnnnnnnnnnnnnnnnnnnnnnnnnnnnnnnnnnnnnnnnnnnnnnnnnnnnnnnnnnnnnnnnnnnnnnnnnnnnnnnnnnnnnnnnnnnnnnnnnnnnnnnnnnnnnnnnnnnnnnnnnnnnnnnnnnnnnnnnnnnnnnnnnnnnnnnnnnnnnnnnnnnnnnnnnnnnnnnnnnnnnnnnnnnnnnnnnnnnnnnnnnnnnnnnnnnnnnnnnnnnnnnnnnnnnnnnnnnnnnnnnnnnnnnnnnnnnnnnnnnnnnnnnnnnnnnnnnnnnnnnnnnnnnnnnnnnnnnnnnnnnnnnnnnnnnnnnnnnnnnnnnnnnnnnnnnnnnnnnnnnnnnnnnnnnnnnnnnnnnnnnnnnnnnnnnnnnnnnnnnnnnnnnnnnnnnnnnnnnnnnnnnnnnnnnnnnnnnnnnnnnnnnnnnnnnnnnnnnnnnnnnnnnnnnnnnnnnnnnnnnnnnnnnnnnnnnnnnnnnnnnnnnnnnnnnnnnnnnnnnnnnnnnnnnnnnnnnnnnnnnnnnnnnnnnnnnnnnnnnnnnnnnnnnnnnnnnnnnnnnnnnnnnnnnnnnnnnnnnnnnnnnnnnnnnnnnnnnnnnnnnnnnnnnnnnnnnnnnnnnnnnnnnnnnnnnnnnnnnnnnnnnnnnnnnnnnnnnnnnnnnnnnnnnnnnnnnnnnnnnnnnnnnnnnnnnnnnnnnnnnnnnnnnnnnnnnnnnnnnnnnnnnnnnnnnnnnnnnnnnnnnnnnnnnnnnnnnnnnnnnnnnnnnnnnnnnnnnnnnnnnnnnnnnnnnnnnnnnnnnnnnnnnnnnnnnnnnnnnnnnnnnnnnnnnnnnnnnnnnnnnnnnnnnnnnnnnnnnnnnnnnnnnnnnnnnnnnnnnnnnnnnnnnnnnnnnnnnnnnnnnnnnnnnnnnnnnnnnnnnnnnnnnnnnnnnnnnnnnnnnnnnnnnnnnnnnnnnnnnnnnnnnnnnnnnnnnnnnnnnnnnnnnnnnnnnnnnnnnnnnnnnnnnnnnnnnnnnnnnnnnnnnnnnnnnnnnnnnnnnnnnnnnnnnnnnnnnnnnnnnnnnnnnnnnnnnnnnnnnnnnnnnnnnnnnnnnnnnnnnnnnnnnnnnnnnnnnnnnnnnnnnnnnnnnnnnnnnnnnnnnnnnnnnnnnnnnnnnnnnnnnnnnnnnnnnnnnnnnnnnnnnnnnnnnnnnnnnnnnnnnnnnnnnnnnnnnnnnnnnnnnnnnnnnnnnnnnnnnnnnnnnnnnnnnnnnnnnnnnnnnnnnnnnnnnnnnnnnnnnnnnnnnnnnnnnnnnnnnnnnnnnnnnnnnnnnnnnnnnnnnnnnnnnnnnnnnnnnnnnnnnnnnnnnnnnnnnnnnnnnnnnnnnnnnnnnnnnnnnnnnnnnnnnnnnnnnnnnnnnnnnnnnnnnnnnnnnnnnnnnnnnnnnnnnnnnnnnnnnnnnnnnnnnnnnnnnnnnnnnnnnnnnnnnnnnnnnnnnnnnnnnnnnnnnnnnnnnnnnnnnnnnnnnnnnnnnnnnnnnnnnnnnnnnnnnnnnnnnnnnnnnnnnnnnnnnnnnnnnnnnnnnnnnnnnnnnnnnnnnnnnnnnnnnnnnnnnnnnnnnnnnnnnnnnnnnnnnnnnnnnnnnnnnnnnnnnnnnnnnnnnnnnnnnnnnnnnnnnnnnnnnnnnnnnnnnnnnnnnnnnnnnnnnnnnnnnnnnnnnnnnnnnnnnnnnnnnnnnnnnnnnnnnnnnnnnnnnnnnnnnnnnnnnnnnnnnnnnnnnnnnnnnnnnnnnnnnnnnnnnnnnnnnnnnnnnnnnnnnnnnnnnnnnnnnnnnnnnnnnnnnnnnnnnnnnnnnnnnnnnnnnnnnnnnnnnnnnnnnnnnnnnnnnnnnnnnnnnnnnnnnnnnnnnnnnnnnnnnnnnnnnnnnnnnnnnnnnnnnnnnnnnnnnnnnnnnnnnnnnnnnnnnnnnnnnnnnnnnnnnnnnnnnnnnnnnnnnnnnnnnnnnnnnnnnnnnnnnnnnnnnnnnnnnnnnnnnnnnnnnnnnnnnnnnnnnnnnnnnnnnnnnnnnnnnnnnnnnnnnnnnnnnnnnnnnnnnnnnnnnnnnnnnnnnnnnnnnnnnnnnnnnnnnnnnnnnnnnnnnnnnnnnnnnnnnnnnnnnnnnnnnnnnnnnnnnnnnnnnnnnnnnnnnnnnnnnnnnnnnnnnnnnnnnnnnnnnnnnnnnnnnnnnnnnnnnnnnnnnnnnnnnnnnnnnnnnnnnnnnnnnnnnnnnnnnnnnnnnnnnnnnnnnnnnnnnnnnnnnnnnnnnnnnnnnnnnnnnnnnnnnnnnnnnnnnnnnnnnnnnnnnnnnnnnnnnnnnnnnnnnnnnnnnnnnnnnnnnnnnnnnnnnnnnnnnnnnnnnnnnnnnnnnnnnnnnnnnnnnnnnnnnnnnnnnnnnnnnnnnnnnnnnnnnnnnnnnnnnnnnnnnnnnnnnnnnnnnnnnnnnnnnnnnnnnnnnnnnnnnnnnnnnnnnnnnnnnnnnnnnnnnnnnnnnnnnnnnnnnnnnnnnnnnnnnnnnnnnnnnnnnnnnnnnnnnnnnnnnnnnnnnnnnnnnnnnnnnnnnnnnnnnnnnnnnnnnnnnnnnnnnnnnnnnnnnnnnnnnnnnnnnnnnnnnnnnnnnnnnnnnnnnnnnnnnnnnnnnnnnnnnnnnnnnnnnnnnnnnnnnnnnnnnnnnnnnnnnnnnnnnnnnnnnnnnnnnnnnnnnnnnnnnnnnnnnnnnnnnnnnnnnnnnnnnnnnnnnnnnnnnnnnnnnnnnnnnnnnnnnnnnnnnnnnnnnnnnnnnnnnnnnnnnnnnnnnnnnnnnnnnnnnnnnnnnnnnnnnnnnnnnnnnnnnnnnnnnnnnnnnnnnnnnnnnnnnnnnnnnnnnnnnnnnnnnnnnnnnnnnnnnnnnnnnnnnnnnnnnnnnnnnnnnnnnnnnnnnnnnnnnnnnnnnnnnnnnnnnnnnnnnnnnnnnnnnnnnnnnnnnnnnnnnnnnnnnnnnnnnnnnnnnnnnnnnnnnnnnnnnnnnnnnnnnnnnnnnnnnnnnnnnnnnnnnnnnnnnnnnnnnnnnnnnnnnnnnnnnnnnnnnnnnnnnnnnnnnnnnnnnnnnnnnnnnnnnnnnnnnnnnnnnnnnnnnnnnnnnnnnnnnnnnnnnnnnnnnnnnnnnnnnnnnnnnnnnnnnnnnnnnnnnnnnnnnnnnnnnnnnnnnnnnnnnnnnnnnnnnnnnnnnnnnnnnnnnnnnnnnnnnnnnnnnnnnnnnnnnnnnnnnnnnnnnnnnnnnnnnnnnnnnnnnnnnnnnnnnnnnnnnnnnnnnnnnnnnnnnnnnnnnnnnnnnnnnnnnnnnnnnnnnnnnnnnnnnnnnnnnnnnnnnnnnnnnnnnnnnnnnnnnnnnnnnnnnnnnnnnnnnnnnnnnnnnnnnnnnnnnnnnnnnnnnnnnnnnnnnnnnnnnnnnnnnnnnnnnnnnnnnnnnnnnnnnnnnnnnnnnnnnnnnnnnnnnnnnnnnnnnnnnnnnnnnnnnnnnnnnnnnnnnnnnnnnnnnnnnnnnnnnnnnnnnnnnnnnnnnnnnnnnnnnnnnnnnnnnnnnnnnnnnnnnnnnnnnnnnnnnnnnnnnnnnnnnnnnnnnnnnnnnnnnnnnnnnnnnnnnnnnnnnnnnnnnnnnnnnnnnnnnnnnnnnnnnnnnnnnnnnnnnnnnnnnnnnnnnnnnnnnnnnnnnnnnnnnnnnnnnnnnnnnnnnnnnnnnnnnnnnnnnnnnnnnnnnnnnnnnnnnnnnnnnnnnnnnnnnnnnnnnnnnnnnnnnnnnnnnnnnnnnnnnnnnnnnnnnnnnnnnnnnnnnnnnnnnnnnnnnnnnnnnnnnnnnnnnnnnnnnnnnnnnnnnnnnnnnnnnnnnnnnnnnnnnnnnnnnnnnnnnnnnnnnnnnnnnnnnnnnnnnnnnnnnnnnnnnnnnnnnnnnnnnnnnnnnnnnnnnnnnnnnnnnnnnnnnnnnnnnnnnnnnnnnnnnnnnnnnnnnnnnnnnnnnnnnnnnnnnnnnnnnnnnnnnnnnnnnnnnnnnnnnnnnnnnnnnnnnnnnnnnnnnnnnnnnnnnnnnnnnnnnnnnnnnnnnnnnnnnnnnnnnnnnnnnnnnnnnnnnnnnnnnnnnnnnnnnnnnnnnnnnnnnnnnnnnnnnnnnnnnnnnnnnnnnnnnnnnnnnnnnnnnnnnnnnnnnnnnnnnnnnnnnnnnnnnnnnnnnnnnnnnnnnnnnnnnnnnnnnnnnnnnnnnnnnnnnnnnnnnnnnnnnnnnnnnnnnnnnnnnnnnnnnnnnnnnnnnnnnnnnnnnnnnnnnnnnnnnnnnnnnnnnnnnnnnnnnnnnnnnnnnnnnnnnnnnnnnnnnnnnnnnnnnnnnnnnnnnnnnnnnnnnnnnnnnnnnnnnnnnnnnnnnnnnnnnnnnnnnnnnnnnnnnnnnnnnnnnnnnnnnnnnnnnnnnnnnnnnnnnnnnnnnnnnnnnnnnnnnnnnnnnnnnnnnnnnnnnnnnnnnnnnnnnnnnnnnnnnnnnnnnnnnnnnnnnnnnnnnnnnnnnnnnnnnnnnnnnnnnnnnnnnnnnnnnnnnnnnnnnnnnnnnnnnnnnnnnnnnnnnnnnnnnnnnnnnnnnnnnnnnnnnnnnnnnnnnnnnnnnnnnnnnnnnnnnnnnnnnnnnnnnnnnnnnnnnnnnnnnnnnnnnnnnnnnnnnnnnnnnnnnnnnnnnnnnnnnnnnnnnnnnnnnnnnnnnnnnnnnnnnnnnnnnnnnnnnnnnnnnnnnnnnnnnnnnnnnnnnnnnnnnnnnnnnnnnnnnnnnnnnnnnnnnnnnnnnnnnnnnnnnnnnnnnnnnnnnnnnnnnnnnnnnnnnnnnnnnnnnnnnnnnnnnnnnnnnnnnnnnnnnnnnnnnnnnnnnnnnnnnnnnnnnnnnnnnnnnnnnnnnnnnnnnnnnnnnnnnnnnnnnnnnnnnnnnnnnnnnnnnnnnnnnnnnnnnnnnnnnnnnnnnnnnnnnnnnnnnnnnnnnnnnnnnnnnnnnnnnnnnnnnnnnnnnnnnnnnnnnnnnnnnnnnnnnnnnnnnnnnnnnnnnnnnnnnnnnnnnnnnnnnnnnnnnnnnnnnnnnnnnnnnnnnnnnnnnnnnnnnnnnnnnnnnnnnnnnnnnnnnnnnnnnnnnnnnnnnnnnnnnnnnnnnnnnnnnnnnnnnnnnnnnnnnnnnnnnnnnnnnnnnnnnnnnnnnnnnnnnnnnnnnnnnnnnnnnnnnnnnnnnnnnnnnnnnnnnnnnnnnnnnnnnnnnnnnnnnnnnnnnnnnnnnnnnnnnnnnnnnnnnnnnnnnnnnnnnnnnnnnnnnnnnnnnnnnnnnnnnnnnnnnnnnnnnnnnnnnnnnnnnnnnnnnnnnnnnnnnnnnnnnnnnnnnnnnnnnnnnnnnnnnnnnnnnnnnnnnnnnnnnnnnnnnnnnnnnnnnnnnnnnnnnnnnnnnnnnnnnnnnnnnnnnnnnnnnnnnnnnnnnnnnnnnnnnnnnnnnnnnnnnnnnnnnnnnnnnnnnnnnnnnnnnnnnnnnnnnnnnnnnnnnnnnnnnnnnnnnnnnnnnnnnnnnnnnnnnnnnnnnnnnnnnnnnnnnnnnnnnnnnnnnnnnnnnnnnnnnnnnnnnnnnnnnnnnnnnnnnnnnnnnnnnnnnnnnnnnnnnnnnnnnnnnnnnnnnnnnnnnnnnnnnnnnnnnnnnnnnnnnnnnnnnnnnnnnnnnnnnnnnnnnnnnnnnnnnnnnnnnnnnnnnnnnnnnnnnnnnnnnnnnnnnnnnnnnnnnnnnnnnnnnnnnnnnnnnnnnnnnnnnnnnnnnnnnnnnnnnnnnnnnnnnnnnnnnnnnnnnnnnnnnnnnnnnnnnnnnnnnnnnnnnnnnnnnnnnnnnnnnnnnnnnnnnnnnnnnnnnnnnnnnnnnnnnnnnnnnnnnnnnnnnnnnnnnnnnnnnnnnnnnnnnnnnnnnnnnnnnnnnnnnnnnnnnnnnnnnnnnnnnnnnnnnnnnnnnnnnnnnnnnnnnnnnnnnnnnnnnnnnnnnnnnnnnnnnnnnnnnnnnnnnnnnnnnnnnnnnnnnnnnnnnnnnnnnnnnnnnnnnnnnnnnnnnnnnnnnnnnnnnnnnnnnnnnnnnnnnnnnnnnnnnnnnnnnnnnnnnnnnnnnnnnnnnnnnnnnnnnnnnnnnnnnnnnnnnnnnnnnnnnnnnnnnnnnnnnnnnnnnnnnnnnnnnnnnnnnnnnnnnnnnnnnnnnnnnnnnnnnnnnnnnnnnnnnnnnnnnnnnnnnnnnnnnnnnnnnnnnnnnnnnnnnnnnnnnnnnnnnnnnnnnnnnnnnnnnnnnnnnnnnnnnnnnnnnnnnnnnnnnnnnnnnnnnnnnnnnnnnnnnnnnnnnnnnnnnnnnnnnnnnnnnnnnnnnnnnnnnnnnnnnnnnnnnnnnnnnnnnnnnnnnnnnnnnnnnnnnnnnnnnnnnnnnnnnnnnnnnnnnnnnnnnnnnnnnnnnnnnnnnnnnnnnnnnnnnnnnnnnnnnnnnnnnnnnnnnnnnnnnnnnnnnnnnnnnnnnnnnnnnnnnnnnnnnnnnnnnnnnnnnnnnnnnnnnnnnnnnnnnnnnnnnnnnnnnnnnnnnnnnnnnnnnnnnnnnnnnnnnnnnnnnnnnnnnnnnnnnnnnnnnnnnnnnnnnnnnnnnnnnnnnnnnnnnnnnnnnnnnnnnnnnnnnnnnnnnnnnnnnnnnnnnnnnnnnnnnnnnnnnnnnnnnnnnnnnnnnnnnnnnnnnnnnnnnnnnnnnnnnnnnnnnnnnnnnnnnnnnnnnnnnnnnnnnnnnnnnnnnnnnnnnnnnnnnnnnnnnnnnnnnnnnnnnnnnnnnnnnnnnnnnnnnnnnnnnnnnnnnnnnnnnnnnnnnnnnnnnnnnnnnnnnnnnnnnnnnnnnnnnnnnnnnnnnnnnnnnnnnnnnnnnnnnnnnnnnnnnnnnnnnnnnnnnnnnnnnnnnnnnnnnnnnnnnnnnnnnnnnnnnnnnnnnnnnnnnnnnnnnnnnnnnnnnnnnnnnnnnnnnnnnnnnnnnnnnnnnnnnnnnnnnnnnnnnnnnnnnnnnnnnnnnnnnnnnnnnnnnnnnnnnnnnnnnnnnnnnnnnnnnnnnnnnnnnnnnnnnnnnnnnnnnnnnnnnnnnnnnnnnnnnnnnnnnnnnnnnnnnnnnnnnnnnnnnnnnnnnnnnnnnnnnnnnnnnnnnnnnnnnnnnnnnnnnnnnnnnnnnnnnnnnnnnnnnnnnnnnnnnnnnnnnnnnnnnnnnnnnnnnnnnnnnnnnnnnnnnnnnnnnnnnnnnnnnnnnnnnnnnnnnnnnnnnnnnnnnnnnnnnnnnnnnnnnnnnnnnnnnnnnnnnnnnnnnnnnnnnnnnnnnnnnnnnnnnnnnnnnnnnnnnnnnnnnnnnnnnnnnnnnnnnnnnnnnnnnnnnnnnnnnnnnnnnnnnnnnnnnnnnnnnnnnnnnnnnnnnnnnnnnnnnnnnnnnnnnnnnnnnnnnnnnnnnnnnnnnnnnnnnnnnnnnnnnnnnnnnnnnnnnnnnnnnnnnnnnnnnnnnnnnnnnnnnnnnnnnnnnnnnnnnnnnnnnnnnnnnnnnnnnnnnnnnnnnnnnnnnnnnnnnnnnnnnnnnnnnnnnnnnnnnnnnnnnnnnnnnnnnnnnnnnnnnnnnnnnnnnnnnnnnnnnnnnnnnnnnnnnnnnnnnnnnnnnnnnnnnnnnnnnnnnnnnnnnnnnnnnnnnnnnnnnnnnnnnnnnnnnnnnnnnnnnnnnnnnnnnnnnnnnnnnnnnnnnnnnnnnnnnnnnnnnnnnnnnnnnnnnnnnnnnnnnnnnnnnnnnnnnnnnnnnnnnnnnnnnnnnnnnnnnnnnnnnnnnnnnnnnnnnnnnnnnnnnnnnnnnnnnnnnnnnnnnnnnnnnnnnnnnnnnnnnnnnnnnnnnnnnnnnnnnnnnnnnnnnnnnnnnnnnnnnnnnnnnnnnnnnnnnnnnnnnnnnnnnnnnnnnnnnnnnnnnnnnnnnnnnnnnnnnnnnnnnnnnnnnnnnnnnnnnnnnnnnnnnnnnnnnnnnnnnnnnnnnnnnnnnnnnnnnnnnnnnnnnnnnnnnnnnnnnnnnnnnnnnnnnnnnnnnnnnnnnnnnnnnnnnnnnnnnnnnnnnnnnnnnnnnnnnnnnnnnnnnnnnnnnnnnnnnnnnnnnnnnnnnnnnnnnnnnnnnnnnnnnnnnnnnnnnnnnnnnnnnnnnnnnnnnnnnnnnnnnnnnnnnnnnnnnnnnnnnnnnnnnnnnnnnnnnnnnnnnnnnnnnnnnnnnnnnnnnnnnnnnnnnnnnnnnnnnnnnnnnnnnnnnnnnnnnnnnnnnnnnnnnnnnnnnnnnnnnnnnnnnnnnnnnnnnnnnnnnnnnnnnnnnnnnnnnnnnnnnnnnnnnnnnnnnnnnnnnnnnnnnnnnnnnnnnnnnnnnnnnnnnnnnnnnnnnnnnnnnnnnnnnnnnnnnnnnnnnnnnnnnnnnnnnnnnnnnnnnnnnnnnnnnnnnnnnnnnnnnnnnnnnnnnnnnnnnnnnnnnnnnnnnnnnnnnnnnnnnnnnnnnnnnnnnnnnnnnnnnnnnnnnnnnnnnnnnnnnnnnnnnnnnnnnnnnnnnnnnnnnnnnnnnnnnnnnnnnnnnnnnnnnnnnnnnnnnnnnnnnnnnnnnnnnnnnnnnnnnnnnnnnnnnnnnnnnnnnnnnnnnnnnnnnnnnnnnnnnnnnnnnnnnnnnnnnnnnnnnnnnnnnnnnnnnnnnnnnnnnnnnnnnnnnnnnnnnnnnnnnnnnnnnnnnnnnnnnnnnnnnnnnnnnnnnnnnnnnnnnnnnnnnnnnnnnnnnnnnnnnnnnnnnnnnnnnnnnnnnnnnnnnnnnnnnnnnnnnnnnnnnnnnnnnnnnnnnnnnnnnnnnnnnnnnnnnnnnnnnnnnnnnnnnnnnnnnnnnnnnnnnnnnnnnnnnnnnnnnnnnnnnnnnnnnnnnnnnnnnnnnnnnnnnnnnnnnnnnnnnnnnnnnnnnnnnnnnnnnnnnnnnnnnnnnnnnnnnnnnnnnnnnnnnnnnnnnnnnnnnnnnnnnnnnnnnnnnnnnnnnnnnnnnnnnnnnnnnnnnnnnnnnnnnnnnnnnnnnnnnnnnnnnnnnnnnnnnnnnnnnnnnnnnnnnnnnnnnnnnnnnnnnnnnnnnnnnnnnnnnnnnnnnnnnnnnnnnnnnnnnnnnnnnnnnnnnnnnnnnnnnnnnnnnnnnnnnnnnnnnnnnnnnnnnnnnnnnnnnnnnnnnnnnnnnnnnnnnnnnnnnnnnnnnnnnnnnnnnnnnnnnnnnnnnnnnnnnnnnnnnnnnnnnnnnnnnnnnnnnnnnnnnnnnnnnnnnnnnnnnnnnnnnnnnnnnnnnnnnnnnnnnnnnnnnnnnnnnnnnnnnnnnnnnnnnnnnnnnnnnnnnnnnnnnnnnnnnnnnnnnnnnnnnnnnnnnnnnnnnnnnnnnnnnnnnnnnnnnnnnnnnnnnnnnnnnnnnnnnnnnnnnnnnnnnnnnnnnnnnnnnnnnnnnnnnnnnnnnnnnnnnnnnnnnnnnnnnnnnnnnnnnnnnnnnnnnnnnnnnnnnnnnnnnnnnnnnnnnnnnnnnnnnnnnnnnnnnnnnnnnnnnnnnnnnnnnnnnnnnnnnnnnnnnnnnnnnnnnnnnnnnnnnnnnnnnnnnnnnnnnnnnnnnnnnnnnnnnnnnnnnnnnnnnnnnnnnnnnnnnnnnnnnnnnnnnnnnnnnnnnnnnnnnnnnnnnnnnnnnnnnnnnnnnnnnnnnnnnnnnnnnnnnnnnnnnnnnnnnnnnnnnnnnnnnnnnnnnnnnnnnnnnnnnnnnnnnnnnnnnnnnnnnnnnnnnnnnnnnnnnnnnnnnnnnnnnnnnnnnnnnnnnnnnnnnnnnnnnnnnnnnnnnnnnnnnnnnnnnnnnnnnnnnnnnnnnnnnnnnnnnnnnnnnnnnnnnnnnnnnnnnnnnnnnnnnnnnnnnnnnnnnnnnnnnnnnnnnnnnnnnnnnnnnnnnnnnnnnnnnnnnnnnnnnnnnnnnnnnnnnnnnnnnnnnnnnnnnnnnnnnnnnnnnnnnnnnnnnnnnnnnnnnnnnnnnnnnnnnnnnnnnnnnnnnnnnnnnnnnnnnnnnnnnnnnnnnnnnnnnnnnnnnnnnnnnnnnnnnnnnnnnnnnnnnnnnnnnnnnnnnnnnnnnnnnnnnnnnnnnnnnnnnnnnnnnnnnnnnnnnnnnnnnnnnnnnnnnnnnnnnnnnnnnnnnnnnnnnnnnnnnnnnnnnnnnnnnnnnnnnnnnnnnnnnnnnnnnnnnnnnnnnnnnnnnnnnnnnnnnnnnnnnnnnnnnnnnnnnnnnnnnnnnnnnnnnnnnnnnnnnnnnnnnnnnnnnnnnnnnnnnnnnnnnnnnnnnnnnnnnnnnnnnnnnnnnnnnnnnnnnnnnnnnnnnnnnnnnnnnnnnnnnnnnnnnnnnnnnnnnnnnnnnnnnnnnnnnnnnnnnnnnnnnnnnnnnnnnnnnnnnnnnnnnnnnnnnnnnnnnnnnnnnnnnnnnnnnnnnnnnnnnnnnnnnnnnnnnnnnnnnnnnnnnnnnnnnnnnnnnnnnnnnnnnnnnnnnnnnnnnnnnnnnnnnnnnnnnnnnnnnnnnnnnnnnnnnnnnnnnnnnnnnnnnnnnnnnnnnnnnnnnnnnnnnnnnnnnnnnnnnnnnnnnnnnnnnnnnnnnnnnnnnnnnnnnnnnnnnnnnnnnnnnnnnnnnnnnnnnnnnnnnnnnnnnnnnnnnnnnnnnnnnnnnnnnnnnnnnnnnnnnnnnnnnnnnnnnnnnnnnnnnnnnnnnnnnnnnnnnnnnnnnnnnnnnnnnnnnnnnnnnnnnnnnnnnnnnnnnnnnnnnnnnnnnnnnnnnnnnnnnnnnnnnnnnnnnnnnnnnnnnnnnnnnnnnnnnnnnnnnnnnnnnnnnnnnnnnnnnnnnnnnnnnnnnnnnnnnnnnnnnnnnnnnnnnnnnnnnnnnnnnnnnnnnnnnnnnnnnnnnnnnnnnnnnnnnnnnnnnnnnnnnnnnnnnnnnnnnnnnnnnnnnnnnnnnnnnnnnnnnnnnnnnnnnnnnnnnnnnnnnnnnnnnnnnnnnnnnnnnnnnnnnnnnnnnnnnnnnnnnnnnnnnnnnnnnnnnnnnnnnnnnnnnnnnnnnnnnnnnnnnnnnnnnnnnnnnnnnnnnnnnnnnnnnnnnnnnnnnnnnnnnnnnnnnnnnnnnnnnnnnnnnnnnnnnnnnnnnnnnnnnnnnnnnnnnnnnnnnnnnnnnnnnnnnnnnnnnnnnnnnnnnnnnnnnnnnnnnnnnnnnnnnnnnnnnnnnnnnnnnnnnnnnnnnnnnnnnnnnnnnnnnnnnnnnnnnnnnnnnnnnnnnnnnnnnnnnnnnnnnnnnnnnnnnnnnnnnnnnnnnnnnnnnnnnnnnnnnnnnnnnnnnnnnnnnnnnnnnnnnnnnnnnnnnnnnnnnnnnnnnnnnnnnnnnnnnnnnnnnnnnnnnnnnnnnnnnnnnnnnnnnnnnnnnnnnnnnnnnnnnnnnnnnnnnnnnnnnnnnnnnnnnnnnnnnnnnnnnnnnnnnnnnnnnnnnnnnnnnnnnnnnnnnnnnnnnnnnnnnnnnnnnnnnnnnnnnnnnnnnnnnnnnnnnnnnnnnnnnnnnnnnnnnnnnnnnnnnnnnnnnnnnnnnnnnnnnnnnnnnnnnnnnnnnnnnnnnnnnnnnnnnnnnnnnnnnnnnnnnnnnnnnnnnnnnnnnnnnnnnnnnnnnnnnnnnnnnnnnnnnnnnnnnnnnnnnnnnnnnnnnnnnnnnnnnnnnnnnnnnnnnnnnnnnnnnnnnnnnnnnnnnnnnnnnnnnnnnnnnnnnnnnnnnnnnnnnnnnnnnnnnnnnnnnnnnnnnnnnnnnnnnnnnnnnnnnnnnnnnnnnnnnnnnnnnnnnnnnnnnnnnnnnnnnnnnnnnnnnnnnnnnnnnnnnnnnnnnnnnnnnnnnnnnnnnnnnnnnnnnnnnnnnnnnnnnnnnnnnnnnnnnnnnnnnnnnnnnnnnnnnnnnnnnnnnnnnnnnnnnnnnnnnnnnnnnnnnnnnnnnnnnnnnnnnnnnnnnnnnnnnnnnnnnnnnnnnnnnnnnnnnnnnnnnnnnnnnnnnnnnnnnnnnnnnnnnnnnnnnnnnnnnnnnnnnnnnnnnnnnnnnnnnnnnnnnnnnnnnnnnnnnnnnnnnnnnnnnnnnnnnnnnnnnnnnnnnnnnnnnnnnnnnnnnnnnnnnnnnnnnnnnnnnnnnnnnnnnnnnnnnnnnnnnnnnnnnnnnnnnnnnnnnnnnnnnnnnnnnnnnnnnnnnnnnnnnnnnnnnnnnnnnnnnnnnnnnnnnnnnnnnnnnnnnnnnnnnnnnnnnnnnnnnnnnnnnnnnnnnnnnnnnnnnnnnnnnnnnnnnnnnnnnnnnnnnnnnnnnnnnnnnnnnnnnnnnnnnnnnnnnnnnnnnnnnnnnnnnnnnnnnnnnnnnnnnnnnnnnnnnnnnnnnnnnnnnnnnnnnnnnnnnnnnnnnnnnnnnnnnnnnnnnnnnnnnnnnnnnnnnnnnnnnnnnnnnnnnnnnnnnnnnnnnnnnnnnnnnnnnnnnnnnnnnnnnnnnnnnnnnnnnnnnnnnnnnnnnnnnnnnnnnnnnnnnnnnnnnnnnnnnnnnnnnnnnnnnnnnnnnnnnnnnnnnnnnnnnnnnnnnnnnnnnnnnnnnnnnnnnnnnnnnnnnnnnnnnnnnnnnnnnnnnnnnnnnnnnnnnnnnnnnnnnnnnnnnnnnnnnnnnnnnnnnnnnnnnnnnnnnnnnnnnnnnnnnnnnnnnnnnnnnnnnnnnnnnnnnnnnnnnnnnnnnnnnnnnnnnnnnnnnnnnnnnnnnnnnnnnnnnnnnnnnnnnnnnnnnnnnnnnnnnnnnnnnnnnnnnnnnnnnnnnnnnnnnnnnnnnnnnnnnnnnnnnnnnnnnnnnnnnnnnnnnnnnnnnnnnnnnnnnnnnnnnnnnnnnnnnnnnnnnnnnnnnnnnnnnnnnnnnnnnnnnnnnnnnnnnnnnnnnnnnnnnnnnnnnnnnnnnnnnnnnnnnnnnnnnnnnnnnnnnnnnnnnnnnnnnnnnnnnnnnnnnnnnnnnnnnnnnnnnnnnnnnnnnnnnnnnnnnnnnnnnnnnnnnnnnnnnnnnnnnnnnnnnnnnnnnnnnnnnnnnnnnnnnnnnnnnnnnnnnnnnnnnnnnnnnnnnnnnnnnnnnnnnnnnnnnnnnnnnnnnnnnnnnnnnnnnnnnnnnnnnnnnnnnnnnnnnnnnnnnnnnnnnnnnnnnnnnnnnnnnnnnnnnnnnnnnnnnnnnnnnnnnnnnnnnnnnnnnnnnnnnnnnnnnnnnnnnnnnnnnnnnnnnnnnnnnnnnnnnnnnnnnnnnnnnnnnnnnnnnnnnnnnnnnnnnnnnnnnnnnnnnnnnnnnnnnnnnnnnnnnnnnnnnnnnnnnnnnnnnnnnnnnnnnnnnnnnnnnnnnnnnnnnnnnnnnnnnnnnnnnnnnnnnnnnnnnnnnnnnnnnnnnnnnnnnnnnnnnnnnnnnnnnnnnnnnnnnnnnnnnnnnnnnnnnnnnnnnnnnnnnnnnnnnnnnnnnnnnnnnnnnnnnnnnnnnnnnnnnnnnnnnnnnnnnnnnnnnnnnnnnnnnnnnnnnnnnnnnnnnnnnnnnnnnnnnnnnnnnnnnnnnnnnnnnnnnnnnnnnnnnnnnnnnnnnnnnnnnnnnnnnnnnnnnnnnnnnnnnnnnnnnnnnnnnnnnnnnnnnnnnnnnnnnnnnnnnnnnnnnnnnnnnnnnnnnnnnnnnnnnnnnnnnnnnnnnnnnnnnnnnnnnnnnnnnnnnnnnnnnnnnnnnnnnnnnnnnnnnnnnnnnnnnnnnnnnnnnnnnnnnnnnnnnnnnnnnnnnnnnnnnnnnnnnnnnnnnnnnnnnnnnnnnnnnnnnnnnnnnnnnnnnnnnnnnnnnnnnnnnnnnnnnnnnnnnnnnnnnnnnnnnnnnnnnnnnnnnnnnnnnnnnnnnnnnnnnnnnnnnnnnnnnnnnnnnnnnnnnnnnnnnnnnnnnnnnnnnnnnnnnnnnnnnnnnnnnnnnnnnnnnnnnnnnnnnnnnnnnnnnnnnnnnnnnnnnnnnnnnnnnnnnnnnnnnnnnnnnnnnnnnnnnnnnnnnnnnnnnnnnnnnnnnnnnnnnnnnnnnnnnnnnnnnnnnnnnnnnnnnnnnnnnnnnnnnnnnnnnnnnnnnnnnnnnnnnnnnnnnnnnnnnnnnnnnnnnnnnnnnnnnnnnnnnnnnnnnnnnnnnnnnnnnnnnnnnnnnnnnnnnnnnnnnnnnnnnnnnnnnnnnnnnnnnnnnnnnnnnnnnnnnnnnnnnnnnnnnnnnnnnnnnnnnnnnnnnnnnnnnnnnnnnnnnnnnnnnnnnnnnnnnnnnnnnnnnnnnnnnnnnnnnnnnnnnnnnnnnnnnnnnnnnnnnnnnnnnnnnnnnnnnnnnnnnnnnnnnnnnnnnnnnnnnnnnnnnnnnnnnnnnnnnnnnnnnnnnnnnnnnnnnnnnnnnnnnnnnnnnnnnnnnnnnnnnnnnnnnnnnnnnnnnnnnnnnnnnnnnnnnnnnnnnnnnnnnnnnnnnnnnnnnnnnnnnnnnnnnnnnnnnnnnnnnnnnnnnnnnnnnnnnnnnnnnnnnnnnnnnnnnnnnnnnnnnnnnnnnnnnnnnnnnnnnnnnnnnnnnnnnnnnnnnnnnnnnnnnnnnnnnnnnnnnnnnnnnnnnnnnnnnnnnnnnnnnnnnnnnnnnnnnnnnnnnnnnnnnnnnnnnnnnnnnnnnnnnnnnnnnnnnnnnnnnnnnnnnnnnnnnnnnnnnnnnnnnnnnnnnnnnnnnnnnnnnnnnnnnnnnnnnnnnnnnnnnnnnnnnnnnnnnnnnnnnnnnnnnnnnnnnnnnnnnnnnnnnnnnnnnnnnnnnnnnnnnnnnnnnnnnnnnnnnnnnnnnnnnnnnnnnnnnnnnnnnnnnnnnnnnnnnnnnnnnnnnnnnnnnnnnnnnnnnnnnnnnnnnnnnnnnnnnnnnnnnnnnnnnnnnnnnnnnnnnnnnnnnnnnnnnnnnnnnnnnnnnnnnnnnnnnnnnnnnnnnnnnnnnnnnnnnnnnnnnnnnnnnnnnnnnnnnnnnnnnnnnnnnnnnnnnnnnnnnnnnnnnnnnnnnnnnnnnnnnnnnnnnnnnnnnnnnnnnnnnnnnnnnnnnnnnnnnnnnnnnnnnnnnnnnnnnnnnnnnnnnnnnnnnnnnnnnnnnnnnnnnnnnnnnnnnnnnnnnnnnnnnnnnnnnnnnnnnnnnnnnnnnnnnnnnnnnnnnnnnnnnnnnnnnnnnnnnnnnnnnnnnnnnnnnnnnnnnnnnnnnnnnnnnnnnnnnnnnnnnnnnnnnnnnnnnnnnnnnnnnnnnnnnnnnnnnnnnnnnnnnnnnnnnnnnnnnnnnnnnnnnnnnnnnnnnnnnnnnnnnnnnnnnnnnnnnnnnnnnnnnnnnnnnnnnnnnnnnnnnnnnnnnnnnnnnnnnnnnnnnnnnnnnnnnnnnnnnnnnnnnnnnnnnnnnnnnnnnnnnnnnnnnnnnnnnnnnnnnnnnnnnnnnnnnnnnnnnnnnnnnnnnnnnnnnnnnnnnnnnnnnnnnnnnnnnnnnnnnnnnnnnnnnnnnnnnnnnnnnnnnnnnnnnnnnnnnnnnnnnnnnnnnnnnnnnnnnnnnnnnnnnnnnnnnnnnnnnnnnnnnnnnnnnnnnnnnnnnnnnnnnnnnnnnnnnnnnnnnnnnnnnnnnnnnnnnnnnnnnnnnnnnnnnnnnnnnnnnnnnnnnnnnnnnnnnnnnnnnnnnnnnnnnnnnnnnnnnnnnnnnnnnnnnnnnnnnnnnnnnnnnnnnnnnnnnnnnnnnnnnnnnnnnnnnnnnnnnnnnnnnnnnnnnnnnnnnnnnnnnnnnnnnnnnnnnnnnnnnnnnnnnnnnnnnnnnnnnnnnnnnnnnnnnnnnnnnnnnnnnnnnnnnnnnnnnnnnnnnnnnnnnnnnnnnnnnnnnnnnnnnnnnnnnnnnnnnnnnnnnnnnnnnnnnnnnnnnnnnnnnnnnnnnnnnnnnnnnnnnnnnnnnnnnnnnnnnnnnnnnnnnnnnnnnnnnnnnnnnnnnnnnnnnnnnnnnnnnnnnnnnnnnnnnnnnnnnnnnnnnnnnnnnnnnnnnnnnnnnnnnnnnnnnnnnnnnnnnnnnnnnnnnnnnnnnnnnnnnnnnnnnnnnnnnnnnnnnnnnnnnnnnnnnnnnnnnnnnnnnnnnnnnnnnnnnnnnnnnnnnnnnnnnnnnnnnnnnnnnnnnnnnnnnnnnnnnnnnnnnnnnnnnnnnnnnnnnnnnnnnnnnnnnnnnnnnnnnnnnnnnnnnnnnnnnnnnnnnnnnnnnnnnnnnnnnnnnnnnnnnnnnnnnnnnnnnnnnnnnnnnnnnnnnnnnnnnnnnnnnnnnnnnnnnnnnnnnnnnnnnnnnnnnnnnnnnnnnnnnnnnnnnnnnnnnnnnnnnnnnnnnnnnnnnnnnnnnnnnnnnnnnnnnnnnnnnnnnnnnnnnnnnnnnnnnnnnnnnnnnnnnnnnnnnnnnnnnnnnnnnnnnnnnnnnnnnnnnnnnnnnnnnnnnnnnnnnnnnnnnnnnnnnnnnnnnnnnnnnnnnnnnnnnnnnnnnnnnnnnnnnnnnnnnnnnnnnnnnnnnnnnnnnnnnnnnnnnnnnnnnnnnnnnnnnnnnnnnnnnnnnnnnnnnnnnnnnnnnnnnnnnnnnnnnnnnnnnnnnnnnnnnnnnnnnnnnnnnnnnnnnnnnnnnnnnnnnnnnnnnnnnnnnnnnnnnnnnnnnnnnnnnnnnnnnnnnnnnnnnnnnnnnnnnnnnnnnnnnnnnnnnnnnnnnnnnnnnnnnnnnnnnnnnnnnnnnnnnnnnnnnnnnnnnnnnnnnnnnnnnnnnnnnnnnnnnnnnnnnnnnnnnnnnnnnnnnnnnnnnnnnnnnnnnnnnnnnnnnnnnnnnnnnnnnnnnnnnnnnnnnnnnnnnnnnnnnnnnnnnnnnnnnnnnnnnnnnnnnnnnnnnnnnnnnnnnnnnnnnnnnnnnnnnnnnnnnnnnnnnnnnnnnnnnnnnnnnnnnnnnnnnnnnnnnnnnnnnnnnnnnnnnnnnnnnnnnnnnnnnnnnnnnnnnnnnnnnnnnnnnnnnnnnnnnnnnnnnnnnnnnnnnnnnnnnnnnnnnnnnnnnnnnnnnnnnnnnnnnnnnnnnnnnnnnnnnnnnnnnnnnnnnnnnnnnnnnnnnnnnnnnnnnnnnnnnnnnnnnnnnnnnnnnnnnnnnnnnnnnnnnnnnnnnnnnnnnnnnnnnnnnnnnnnnnnnnnnnnnnnnnnnnnnnnnnnnnnnnnnnnnnnnnnnnnnnnnnnnnnnnnnnnnnnnnnnnnnnnnnnnnnnnnnnnnnnnnnnnnnnnnnnnnnnnnnnnnnnnnnnnnnnnnnnnnnnnnnnnnnnnnnnnnnnnnnnnnnnnnnnnnnnnnnnnnnnnnnnnnnnnnnnnnnnnnnnnnnnnnnnnnnnnnnnnnnnnnnnnnnnnnnnnnnnnnnnnnnnnnnnnnnnnnnnnnnnnnnnnnnnnnnnnnnnnnnnnnnnnnnnnnnnnnnnnnnnnnnnnnnnnnnnnnnnnnnnnnnnnnnnnnnnnnnnnnnnnnnnnnnnnnnnnnnnnnnnnnnnnnnnnnnnnnnnnnnnnnnnnnnnnnnnnnnnnnnnnnnnnnnnnnnnnnnnnnnnnnnnnnnnnnnnnnnnnnnnnnnnnnnnnnnnnnnnnnnnnnnnnnnnnnnnnnnnnnnnnnnnnnnnnnnnnnnnnnnnnnnnnnnnnnnnnnnnnnnnnnnnnnnnnnnnnnnnnnnnnnnnnnnnnnnnnnnnnnnnnnnnnnnnnnnnnnnnnnnnnnnnnnnnnnnnnnnnnnnnnnnnnnnnnnnnnnnnnnnnnnnnnnnnnnnnnnnnnnnnnnnnnnnnnnnnnnnnnnnnnnnnnnnnnnnnnnnnnnnnnnnnnnnnnnnnnnnnnnnnnnnnnnnnnnnnnnnnnnnnnnnnnnnnnnnnnnnnnnnnnnnnnnnnnnnnnnnnnnnnnnnnnnnnnnnnnnnnnnnnnnnnnnnnnnnnnnnnnnnnnnnnnnnnnnnnnnnnnnnnnnnnnnnnnnnnnnnnnnnnnnnnnnnnnnnnnnnnnnnnnnnnnnnnnnnnnnnnnnnnnnnnnnnnnnnnnnnnnnnnnnnnnnnnnnnnnnnnnnnnnnnnnnnnnnnnnnnnnnnnnnnnnnnnnnnnnnnnnnnnnnnnnnnnnnnnnnnnnnnnnnnnnnnnnnnnnnnnnnnnnnnnnnnnnnnnnnnnnnnnnnnnnnnnnnnnnnnnnnnnnnnnnnnnnnnnnnnnnnnnnnnnnnnnnnnnnnnnnnnnnnnnnnnnnnnnnnnnnnnnnnnnnnnnnnnnnnnnnnnnnnnnnnnnnnnnnnnnnnnnnnnnnnnnnnnnnnnnnnnnnnnnnnnnnnnnnnnnnnnnnnnnnnnnnnnnnnnnnnnnnnnnnnnnnnnnnnnnnnnnnnnnnnnnnnnnnnnnnnnnnnnnnnnnnnnnnnnnnnnnnnnnnnnnnnnnnnnnnnnnnnnnnnnnnnnnnnnnnnnnnnnnnnnnnnnnnnnnnnnnnnnnnnnnnnnnnnnnnnnnnnnnnnnnnnnnnnnnnnnnnnnnnnnnnnnnnnnnnnnnnnnnnnnnnnnnnnnnnnnnnnnnnnnnnnnnnnnnnnnnnnnnnnnnnnnnnnnnnnnnnnnnnnnnnnnnnnnnnnnnnnnnnnnnnnnnnnnnnnnnnnnnnnnnnnnnnnnnnnnnnnnnnnnnnnnnnnnnnnnnnnnnnnnnnnnnnnnnnnnnnnnnnnnnnnnnnnnnnnnnnnnnnnnnnnnnnnnnnnnnnnnnnnnnnnnnnnnnnnnnnnnnnnnnnnnnnnnnnnnnnnnnnnnnnnnnnnnnnnnnnnnnnnnnnnnnnnnnnnnnnnnnnnnnnnnnnnnnnnnnnnnnnnnnnnnnnnnnnnnnnnnnnnnnnnnnnnnnnnnnnnnnnnnnnnnnnnnnnnnnnnnnnnnnnnnnnnnnnnnnnnnnnnnnnnnnnnnnnnnnnnnnnnnnnnnnnnnnnnnnnnnnnnnnnnnnnnnnnnnnnnnnnnnnnnnnnnnnnnnnnnnnnnnnnnnnnnnnnnnnnnnnnnnnnnnnnnnnnnnnnnnnnnnnnnnnnnnnnnnnnnnnnnnnnnnnnnnnnnnnnnnnnnnnnnnnnnnnnnnnnnnnnnnnnnnnnnnnnnnnnnnnnnnnnnnnnnnnnnnnnnnnnnnnnnnnnnnnnnnnnnnnnnnnnnnnnnnnnnnnnnnnnnnnnnnnnnnnnnnnnnnnnnnnnnnnnnnnnnnnnnnnnnnnnnnnnnnnnnnnnnnnnnnnnnnnnnnnnnnnnnnnnnnnnnnnnnnnnnnnnnnnnnnnnnnnnnnnnnnnnnnnnnnnnnnnnnnnnnnnnnnnnnnnnnnnnnnnnnnnnnnnnnnnnnnnnnnnnnnnnnnnnnnnnnnnnnnnnnnnnnnnnnnnnnnnnnnnnnnnnnnnnnnnnnnnnnnnnnnnnnnnnnnnnnnnnnnnnnnnnnnnnnnnnnnnnnnnnnnnnnnnnnnnnnnnnnnnnnnnnnnnnnnnnnnnnnnnnnnnnnnnnnnnnnnnnnnnnnnnnnnnnnnnnnnnnnnnnnnnnnnnnnnnnnnnnnnnnnnnnnnnnnnnnnnnnnnnnnnnnnnnnnnnnnnnnnnnnnnnnnnnnnnnnnnnnnnnnnnnnnnnnnnnnnnnnnnnnnnnnnnnnnnnnnnnnnnnnnnnnnnnnnnnnnnnnnnnnnnnnnnnnnnnnnnnnnnnnnnnnnnnnnnnnnnnnnnnnnnnnnnnnnnnnnnnnnnnnnnnnnnnnnnnnnnnnnnnnnnnnnnnnnnnnnnnnnnnnnnnnnnnnnnnnnnnnnnnnnnnnnnnnnnnnnnnnnnnnnnnnnnnnnnnnnnnnnnnnnnnnnnnnnnnnnnnnnnnnnnnnnnnnnnnnnnnnnnnnnnnnnnnnnnnnnnnnnnnnnnnnnnnnnnnnnnnnnnnnnnnnnnnnnnnnnnnnnnnnnnnnnnnnnnnnnnnnnnnnnnnnnnnnnnnnnnnnnnnnnnnnnnnnnnnnnnnnnnnnnnnnnnnnnnnnnnnnnnnnnnnnnnnnnnnnnnnnnnnnnnnnnnnnnnnnnnnnnnnagtattctcagcaacttctttgtgacgtttgcattcatctcacagtgttgaacataccttttcatagagtagttttgaaacactatttttgtagaatctgcaagtggatatttggactgcgttgagaccttcattggaaatgggaatgtcttcacataaacactagacagaagcattctctgaaacttctttgtgatgtgtgtattcaactcacagagttgaaccttccttttttatggagcagttttgaaacactgtttttgtagaatctgcaagtggatatttggagcgatttgaggcctatggtagaaaaagaaatatcttcatataaatagtagacagaagtattctcagaaacatctttgtgatgtttgcattcaactcacagagttgatccttccttttaatagggcagttttgcaacactctttttgtagaatgcaccagtgggcttttggagcacgtcaagggctatggtgaaaaaggaaatatcttcacataaaaactagacagaagtattctgtaaaactcctttgtgatgtttgcattcagctcagaaagttgaacttctctttatatagtccagttttcaaacactatttttgtagaatctgcaagtggatactgggactgctttgaggccttcgttggaaacgggattatcttcacatagaaactagactgaaggattcttagaaacttctttgtgatgtgtgcattcaactcaccgagtggaacctcacttttgatagagcagagttgaaagacacttgttgtagaatctgcatgtggatatttggagtgctttgaagccttccttggaaacgggaatatcttcacataaaaactagacataaggattctcagaaacttccttgtgatctgtccattcaacacacagagttgaactttcctttttatggagccgttttgaaacactgtttttgtagaatctgaaagtggatatttggagcgctttgaggcttaaggtagaaaaagaaatatctgcatatcaaaactagacagaagcgttctcagaaacttctttgtgatgtttgcattcaactaccagagttgaaccttccttttgatagaggagttttgaaatgctctttttgtagaatctgcacgtggatacctggaacgatttttgagacctatgtctcaaaaggaaatatcttcctatgaaaaatagacaaaagcattctcagaaactactttgtgttatgtgcattcaactcacagagtacaaccttttttttgatagagtagttttgaaacactctgtagaatctgaaagtggatatttggagctctttgagggctatggtggaaaagaaaatatattcacattaaactagccagaagcattctcagaaacttctttatgatgtttgcattaaactcacagagttgaacatacctttccatagagcagttttgaaacactctttttgtggaatccgcaagcggatatttggaccgctttgagaccttcgctggaaatgggaatgtcttcacatataaactaaacagaagcattctcagaaacttcttcgtgatgtgtgcattctactcccaaagttgaaccttccttttcataaagcatttttgaaacactccttttgtacaatctacaattggatatttggaacgctttgatgcccgtggtagaaaaggaaatctcctcatataaaaactagacagaaggattcacagaaactgctttgtgacgtgtgcattcaaatcacggagttggacctttcttttgttagagcagttttgaaacactgtttctgtggaatctgccagcggacatttggagcgcattgagggctatggtggagaaggaaatatcttcacagaaaaactagaaagaagcattctcggaaacatctatgtgaagtgtgcattcaactcacagagttgaaccttccttttgatagaagagttttgaaacactcttttgtacaattgcaggtgaatatttggagcgctttgaagcctttgttggaaatgggaatatcctcacataaaaactagccagaagcattctcagaaacttctatgtgatgtgtgcattgaacccagagaggtgaaccgttcctttgagagagcagttttgaaacgtgtttttgtaagatctgcaagtggatattaggggcgctttgagtccttaggtggaaacgggaatatcttcgaataaaaactagacagaatgattctcagaatcttctttgtgatgtgggcattcaactaacacagttgaacatttcttttgacagagcagttctgaaacactctttttgtagaatccgccagtggatatttggagcgctttgagggctattgtgcaaatggaaatatcttcacctaaaaactagaccgaagcaatcccagaaactactttgtgatgtttgcattcaactcatagagttgaacctacctcttcatagagcagtttggaaaacctctttttgtagaatctgcaagtggatatttggaccactttgaggccttcataggaaacagtactatcttcacataaaaactaggtagaagcattgtcagaaaattctttgtgatgtgtgaattcaactcacagagttgaaccttcctttaatagagcagttttgaaacactctttttgtagaatctgcaagtagatatttggagcgctttgaggccttcgttggaaaccggaatatcttcacataaaaagtagatagaggcattctcagaaactttttttgtgatatgtagattcagttcacagcgttgaacctttcttttgatagagcagttttgaaaaactcttttatcgagtctgcaagtagacatttggagtgctttgagggctgtggtcgaaaaggaaatatcttcacatagaaactagactgaatcattctcagcaacttcttggtgacgtttgcattcatctcacagtgttgaacatacctttgcatagagtagttttgaaacactatttttgtagaatctgcaagtggacatttggactgctttgaggccttcatcggaaacgggaatatcttcacataaacactagacagaagcattctctgaaacttctttgtgatgtgtgtattcaactcacagagttgaaccatcttttttatggagcggttttgaaacagtgttttttgtagaatcagcaattggatattgggagcgctttgaggcctctggtgtaaagggaatgtcttcacataaaaactggacagaagcattctcagaaacatctttgtgatgtttgcattcaactcacagagttgatccttccttttaatagggcagttttgcaacactctttttgtagaatgcaccagcgggcttttggagcacgtcaagggctatggtgaaaaaggaaatatcttcacaaaaaaccagacagaagtattctgtaaaactcctttgtgatgtttgcattcaactcagaaagttgaacttctctttatatagtccagttttcaaacactatttttgtagaatctgcaagtggatagtgggactgctttgaggccttcattggaaacgggattatcttcacataaaaactagacataaggattcttagaaacttctttgtgatgtgtgcattcaactcaccgagtggaacctcacttttgatagagcagtgttgaaagacacttgttgtagaatctgcaggtggatatttggagtgctttgaagccttccttggaaacgggaatatcttcacataaaaactagacataagcattctcagaaactcctttgtgatctgtccattcagctcacagagttgaaccttccttttgatagagcagttttgaaacactctttctgtagagtgtgcaagtggatatcaggagcgctttgtcgcctatggcagaaaaagaaatatctggctctaaaaactagacagaagcgttctcagaaacttctttgtgatgtttgcattcaactaccagagttgaaccttccttttgatagagcagttttgaaacgctctttttgtagaatctgcacgtggatatctggagcgatttttgaggcctacgttcaaaaaggaaatatcttcctatgaaaaacagacaaaagcattctcagaaactacttagagatatgtgcattcaactcacagagttgaaacttttttttgatagagcagttttgaaacactctgtagaatctgaaagtggatatttggagctatttgagggctatggtggaaaagaaaatatattcccattaaactagacagaagcattctcagaaacttctgtatgatgtttgcattaaactcacagagttgaacatacctttccatagagcagttttgaaacactctttttgtggaatccgcaagtggatatttggaccgctttgagaccttcgctggaaatgggaatatcttcacatataaactatacagaagcattctcggaaacttcttcgtgatgtgtgcattctgctcccaaagttgaaccttccttttcataaagcagttttgaaacactcttttgtacaatctaccattggatatgtggaaggctttgatgcccatggtagaaatggaaacatcctcatataaaatctagacagaaggattcacagaaactgctgtgtgatgtgtgcatcgaaatcacggagttgaacttttcttttgttagagcagttttgaaaccccgtttccgtggaatctgccagtggacatttggagcgcattgagggctatggtggagaaggaaatatcttcacataaaaactagaaagaagcattctcagaaacatctatgtgaaatgtgcattcaactcacagatttgaaccttccttttgatagaacagttttgaaacactcttttgtacaattttaggtgaatatttggagctccttgaagcctttgttggaattgtgaatatcttcacatacaaactagccagaagcattctcagaaacttctttgtgatgtgtgcgttgaactcagagagatgaacctttcctttgatagagcagttttgaaacgtgtttctgtaagatctgtatgtggatatttggggcgctttgagtcctttggtggaaacgggaatatcttctaataaaaactagacaaaaatattctcagaatcttctttgtgatgagggcattcaactaacacatttgaacatttcttttcacagagcagttttgaaacactcttttggtggaatctgccagaggatatctggagcgctttgagggctattgtgccaatggaaatatcttcccctaaaaactagacagaagcattctcagaaactacttcgtgatgtttgcattcaactcacagagttgaacatacctcttcatagagcagttttgaaaacctctttctgtagaatctgcaagtggatattcggaccactttgaggccttcataggaaacagtaatatcttcacataaaaactagatagaagcattgtcagaaagttctttgtgatgtgtgaattcaactcacagagttgaaccttcctttaatagagcagttttgaaacactctttttctagaatctgcaagtagatatttggagcgctttgaggccttcgttggaaaccggaatatcttcacaggaaaagtagatagaggcatgctcagaaacttttttgtcatatgtagattcaactcacagcgttgaacctttcttttgatagagcagttttgaaaaactcttttatcgaatctgcaagtagacatttggagtgctttgagggctgtggtgcaaaaggaaatgtcttcccatagaaactagactgaagcattctcagcaacttctttgtgacgtttgcattgatctcacagtgttgaacatacctttgcatagagtagttttgaaacactatttttgtagaatctgcaagtggatatttggactgctttgaggcctctatcggaaacgggaatatcttcacataaacactggacagaagcattctctgaaacttctttgtgatgtgtgtattcaactcacagagtggaaccatcttttttatggagcggttttgaaacagtgtttttgtagaatcagcaattggatatttggagcgctttgaggcctctggtggaaagggaatgtcttcacataaaaactggacagaagcattctcagaaacatctttgtgatgtttgcattcaactcacagagttgatccttccttttaatagggcagttttgcaacactctttttgtagaatgcaccagtgggcttttggagcacgtcaagggctttggtgaaaaaggaaatatcttcacataaaaactagacagaagtattctgtaaaactcctttgtgatgtttgcattcaactcagaaagttgaacttctctttatatagtccagttttcaaacactatttttgtagaatctgcaagtggatactgggactgctttgaggccttcgttggaaacgggattatcttcacataaaaactagactgaaggattcttagaaacttctttgtgatgtgtgcattcaactcaccgagtggaacctcacttttgatagagcagtgttgaaagacacttgttgtagaatctgcaggtggatatttggagtgctttgaagccttccttggaaacgggaatatcttcacataaaaactagacataagcattctcagaaactcctttgtgatctgtccattcagctcacagagttgaaccttccttttgatagagcagttttgaaacactctttctgtagagtctgcaagtggatatcaggagcgctttgaagcctatggtagaaaaagaaatatctggctctaaaaactagacagaagcattctgagaaacttctttgtgatgtttgcattcaactaccagagttgaaccttcctttttgatagagcagttttgaaacactctttttgtagaatctgcatgtggatatctggagcgatttgaggcctatggtcaaaaaggaaatatcttcctatgaaaaactgacaaaagcattctcagaaactactttgtgttatgtgcattcaactcacagagtacaaccttttttttgatagagcagttttgaaacactctgtagaatctgaaagtggatatttggagctctttgagggctatggtggaaaagaaaatatattcacattaaactagccagaagcatcctcagaaacttctttatgatgtttgcattaaactcacagagttgaacacaccattccatagagcagtgttgaaacactctttttggggaatccgcaagtggatatttggaccgctttgagacctttgctggaaatgggaatatcttcacatataaactagacagaagcattctcggaaacttcttcgtgatgtgtgcattctgctcccaaagttgaaccttcctcttcataaagcagttttgaaacactcttttgtacaatctaccattggatatgtggaaggctttgatgcccatggtagaaaaggaaacatcttcatataaaatctagacagaaggattcacagaaactgctgtgtgatgtgtgcatccaaatcacggagttgaacttttcttttgttagagcagttttgaaaccccgtttccgtggaatctgccagtggacatttggagcgcattgagggctatggtggagaaggaaatatcttcacataaaaactagaaagaagcattctcagaaacatctatgtgaagtgtgcattcaactcacagagttgaaccttccttttgatagaagagttttgaaacactcttttgtacaattgcaggtgaatatttggagcgatttgaagcctttgttggaaatgggaatatcctcacataaaaactagccagaagcattctcagaaacttctttgtgatgtgtgcgttgaacccagagagatgaacctttcctttgatagagcagttttgaaacgtgtttttgtaagatctgcaagcggataattggcttcgctttgtgtcctttgttggaaacgggaatatcttctaataaaaactagacagaattattctcagaatcttctttgtgatgtgggcattcaactaacacagttgaacatttcttttgacagagcagttctgaaacactctttttgtagaatccgccagtggatatttggagcgctttgagggctattgtgcaaatggaaatatctacacctaaaaactagaccgaagcattctcagaaactactttgtgatgtttgcattcaactcacagagatgaacatacctctttatagagcagttttgaaatcctctttctgtagaatctgcaagtggatattcggaccactttgaggccttcatagaaaacagtaatatcttcacataaaaactagattcaagcattctcagaaacttctttgtgatgtgtgaattcaactcacagagttgaaccttcctttaatagagcagttttgaaacactctttttgtagaatctgcaagtagatatttggagagctttgaggccttcgttggaaaccggaatatcttcacataaaaagtagatagaagcattctcagaaactttttttgatatgtagattcaactcacagcattcaacctttcttttgatagagcagtttggaaaactcttttatcaaatctgcaagtagacatttggagtgctttgagggctgtggtcgaaaaggaaatatcttcacatagaaactagactgaagcattctcagcaacttcttcgtgtcgtttgcattcatctcacactgttgaacataccttttcttagagcagttttgaaacattctttttgtagaaactgcaattggatatttggactgcgttgaggcctccactggaaacgggaatatcttcacataaacaatagacagaagcattctctgaaacttctttgtgatgtgtgtattcaactcacagagttgaaccatcttttttatggagcggttttgaaacagtgtttttgtagaatcagcaagtggatattgggagcgctttgaggcctctggtggaaagggaatgtcttcacataaaaactggacagaagcattctcagaaacatctttgtgatgtttgcattcaactcacagagttgatccttccttttaatagggcagttttgcaacactctttttgtacaatgcaccagtgggcttttggagcacgtcaagggctatggtgaaaaaggaaatatcttcacataaaaactagacagaagtattctgtaaaactcctttgtgatgtttgcattcaactcagaaagttgaacttctctttatatagtccagttttcaaacactatttttgtagaatctgcaagtggatactgggactgctttgaggccttcgttggaaacgggattatcttcacatagaaactagactgaaggattcttagaaacttctttgtgatgtgtgcattcaactcaccgagtggaacctcacttttgatagagcagagttgaaagacacttgttgtagaatctgcaggtggatatttggagtgctttgaagccttccttggaaacgggaatatcttcacataaaaactagacataagcattctcagaaactcctttgtgatctgtccattcagctcacagagttgaaccttccttttgatagagcagttttgaaacactctttctgtagagtgtgcaagtggatatcaggagcgcttcgaggcctatggcagaaaaagaaatatctggctctaaaaactagacagaagcattctcagaaacttctttgtgatgtttgcattcaactaccagagttgaaccttccttttgatagaacagttttgaaacgctctttttgtagaatctgcatgtggatacctggagcgatttttgagacctatgtctcaaaaggaaatatcttcctatgaaaaatagacaaaagcattctcagaaactactttgtgttatgtgcattccactcacagagttgaaccttttttttgatacagcagttttgaaacactctgtagaatctgaaagtggatatttgtagctctttgagggctatggtggaaaagaaaatatattcacattaaactagacagaagcattctcagaaacttctttatgatgtttgcatcaaactcacagatttgaacatacctttccatagagcagttttgaaacactctttttgtggaatccgcaagtggatatttggaccgttttgagacctttgctggaaatgggaatatcttcatatataaactggacagaatcattctcggaaacttcttcctgatgtgtgcattctgctcccaaatttgaaccttcttcttcataaagcagttttgaaacactcttttgtacaatctaccattggatatgtggaaggctttgatgcccatggtagaaaaggatacatcctcatataaaatctagacagaaggattcacagaaactgctgtgtgatgtgtgcatccaaatcacggagttgaacttttcttttgttagagcagttttgaaaccccgtttccgtggaatctgcctgtggacatttggagcgcattgagggctatggtggagaaagaaatatcttcacataaaaactagaaagaagcattctcagaaacatctatgtgaagtgtgcattcaactcacagagttgaaccttccttttgatagaagagttttgaaacactcttttgtactattgcaggtgaatatttggagcgatttgaagcctttgttggaaatgggaatatcctcacataaaaagtagccagaagcattctcagaaacttctttgtgatgtgtgcattgaacccagagagatgaaccattcctttgatagagcagttttgaaacgtgtttctgtaagatctgcaagtggatatttgggacgctttgagtcctttggtggaaacgggaatatcttctaataaaaactagaccgaaatattctcagaatcttctttgtgatgtgggcattcaactaacagagttgaacatttcttgtgacagagcagttttgaaacactctttttgtagaatctgccagtggatatttggagcgctttgagggctttgtagaaatggaaaagtcttcacctaaaaactagacagaagcaatcccagaaactactttgtgatgtttgcattaaactcatagagttgaacctacctcttcatagagcagtttggaaaacctctttttgtagaatctgcaagtggatatttggaccactttgaggccttcataggaaacagtactatcttcacataaaatctaggtagaagcattgtcagaaagttctttgtgatgtgtgaattcaactcacagagttgaaccttcctttaatagagcagttttgaaacactctttttgtagaatctgcaagtacatatttggagcgctttgaggccttcgttggaaaccggaatatcttcacataaaaagtagatagaggcattctcagaaacttttttgtgatatgtagattcagttcacagcgttgaacctttcttttgatagagcagttttgaaaaactcttttatcgaatctgtaagtagacatttggagtgctttgagggctgtggtcgaaaaggaaatatcttcacatagaaactagactgaagcattctcagcaacttctttgtgtcgtttgcattcatctcacagtgttgaacataccttttcatagagcagttttgaaacactctttttgtagaatctgcaattggatatttggactgcgttgaggcctccactggaaacgggaatatcttcacataaacactagacagaagcattctctgaaacttctttgtgatgtgtgtattcaactcacagagttgaaccatcttttttatggagcggttttgaaacagtgtttttgtagaatcagcaagtggatatttggagcgctttgaggcctctggtggaaagggaatgtcttcacataaaaactggacagaagtattctcagaaacatctttgtgatgtttgcattcaactcacagagttgatccttccttttaatagggcagttttgcaacactctttttgtagaatgcaccagtgggcttttggagcacgtcaagggctatggtgaaaaaggaaatatcttcacataaaaactagacggaagtattctgtaaaactcctttgtgatgtttgcattcaactcagaaagttgaacttctctttatatagtccagttttcaaacactatttttgtagaatctgcaagtggatactgggactgctttgaggccttcgttggaaacgggattatcttcacatagaaactagactgaaggattcttagaaacttctttgtgatgtgtgcattcaactcaccgagtggaacctcacttttgatagagcagtgttgaaagacacttgttgtagaatctgcaggtggatatttggagtgctttgaagccttccttggaaacgggaatatcttcacataaaaactagacataagcattctcagaaactcctttgtgatctgtccattcagctcacagagttgaaccttccctttgatagagcagttttgaaacactctttctgtagagtctgcaagtggatatcaggagcgctttgaagcctatggtagaaaaagaaatatctggctctaaaaactagacagaagcattctcagaaacttctttgtgatgtttgcattcaactaccagagttgaaccttccttttgatagagcagttttgaaacactctttttgtagaatctgcacgtggatatctggagcgatttttgaggcctacgttcgaaaaggaaatatcttcctatgaaaaatagacaaaagcattctcacaaactactttgagatatgtgcattcaactcacagagttgaaacttttttttgatagagcagttttgaaacactctgtagaatctgaaagtggatatttggagctatttgagggctatggtggaaaggaaaatatattcccattaaactagacagaagcatcctcagaaacttctttatgatgtttgcattaaactcacagagttgaacatacctttccatagagcagttttgaaacactctttttggggaatccacaagtggatatttggaccgctttgagacctttgctggaaatgggaatatcttcacatataaactagacagaagcattctcagaaagttcttcgtgatgtgtgcattctactcccaaagttgaaccttccttttcataaggcagttttgaaacactccttttgtacaatctacaattggatatttggaacgctttgatgcccgtggtagaaaaggtaatgtcctcatataaaaactagacagaaggattcacagaaactgctgtgtgatgtgtgcatcgaaatcacggagttgaacttttcttttgttagagcagttttgaaaccctgtttccgtggaatctgccagtggacatttggagcgcattgagggctatggtggagaaggaaatatcttcacataaaaactagaaagaagcattctcagaaacatctatgtgaagtgtgcattcaactcacagagttgaaccttccttttgatagaagagttttgaaacactcttttgtacaattgcaggtgaatatttggagcgctttgaagcctttgttggaaatgggaatatcctcacataaaaactagccagaagcattctcagaaacttctttgtgatgtgtgcattgaacccagagagatgaaccatttctttgagagagcagttttgaaacgtgtttttgtaagatctgcaagtggatatttggggcgctttgagcccttaggtggaaacgggaatatcttcgaataaaaactagacagaaatattctcagaatcttctttgtgatgtgggcattcaactaacacagttgaacatttcttttgacagagcagttttgaaacacacttttagtagaatctgccagtggatatttggggcgctttgagggctattgtgcaaatggaaatatcttcacctaaatactagacagaagcattctcagaaactacgttgtgatgtttgcattcaactcacagtgttgaacatacatcttcatagagcagttttgaaaacctcttttggtagaatctgcaagtggatattttgaccactttgaggccttcataggaaacagtaatatcttcacataaaaactagatggaagcattctcagaaacttctttgtgatgtgtgaattcaactcacagagttgaaccttcctttaatagagcagttttgaaacactctttttgtagaatctgccagtagatatttggagcgctttcaggccttcgttggaaaccggaatatcttcacataaaaagtagatagaggcattctcagaaacttttttgtgatatgtagattcaactcagagcgttgaacctttcttttgatagagcagttttgaaaaactcttttatcgaatctgcaagtagacatttggagtgctttgagggctgtggtcgaaaaggaaatatcttcacatagaaactagactgaagcattctcagcaacttctttgtgacgtttgcattcatctcacagtgttgaacataccttttcatagagcagttttgaaacactatttttgtagtatctgcaagtggatatttggactgctttgaggccttcattggaaacgggaatatattcacataaacactagacagaagcattctctgaaacttctttgtgatgtgtgtattcaactcacagagttgaaccatcttttttatggagcggttttgaaacagtgtttttgtagaatcagcaattggatatttggagcgctttgaggcctctggtggaaagggaatgtcttcacataaaaactggacagaagcattctcagaaacatctttgtgatgtttccattcaactcacagagttgatccttccttttaatagggcagttttgcaacactctttttgtacaatgcaccagtgggcttttggagcacgtcaagggctatggtgaaaaaggaaatatcttcacataaaaactagacagaagtattgtgtaaaactcctttgtgatgtttgcattcaactcagaaagttgaacttctctttatatagtccagttttcaaacactatttttgtagaatctgcaagtggatactgggactgctttgaggccttcattggaaacgggattatcttcacataaaaactagactgaaggattcttagaaacttctttgtgatgtgtgcattcaactcaccgagtggaacctcacttttgatagagcagtgttgaaagacacttgttgtagaatctgcaggtggatatttggagtgctttgaagacttccttggaaacgggaatatcttcacataaaaactagacataagcattctcagaaacttctttgtgatctgtccattcaactcacagagttgaaccttcctttttatggagccgttttgaaacactgtttttgtagaatctgcaagtggatatttggagcgctttgaggcctatggtagagaaagaaatatctgcatatcaaaactagacagaagcattctgagaaacttctttgtgatgtttgcattcaactaccagagttgaacattcctttttgatagagcagttttgaaacactctttttgtagaatctgcatgtggatatctggagcgatttgaggcctatggtcaaaaaggaaatatcttcctatgaaaaacagacaaaagcattctcagaaactacttagagatatgtgcattcaactcacagagttgaaacttttttttgatagagcagttttgaaacactctgtagaatctgaaagtggatatttggagctatttgaggggctatggtggaaaagaaaatatattcccattaaactagacagaagcatcctcagaaacttctttatgatgtttgcattaaactcacagagttgaacacaccattccatagagcagttttgaaacactctttttggggaatccgcaagtggatatttggaccgctttgagacctttgctggaaatgggaatatcttcacatataaactagacagaagcattctcggaaacttcttcgtgatgtgtgcattctgctcccaaagttgaaccttccttttcataaagcagttttgaaacactcttttgtacaatctaccattggatatgtggaaggctttgatgcccatggtagaaaaggatacatcctcatataaaatctagacagaatgattcacagaaactgctttgtgatgtgtgcattcaaatcacggagttggacctttcttttattagagcagttttgaaacactgtttctgtggaatctgccagtggacatttggagcgcattgagggctatggtggagaaggaaatatcttcacataaaaactagaaagaagcattctcagaaacacctatgtgaagtgtgcattcaactcacagagttgaaccgttcttttgatagaagagttttgaaacactcttttgtacaattgcaggtgaatatttggagcgctttgaagcctttgttggaaatgggaatatcctcacataaaaactagccagaagcattctcagaaacttctttgtgatgtgtgcgttgaacccagagagatgaacctttcctttgatagagcagttttgaaacgtgtttttgtaagatctgcaagcggataattggcttcgctttgtgtcctttggtggaaacgggaatatcttctaataaaaactagacagaattattctcagaatcttctttgtgatgtgggcattcaactaacacagttgaacatttcttttgacagagcagttctgaaacactctttttgtagaatccgccagtggatatttggagcgctttgagggcaattgtgcaaatggaaatatcttcacctaaaaactagaccgaagcattctcagaaactgctttgtgatgtttgcattcaactcacagagttgaacatacctcttcatagagcagttttgaaaacccctttttgtagaatctgcaagtggatatttggaccactttgaggccttcatagaaaacagtaatatcttcacataaagactagatggaagcattctcagaaacttctttgtgatgtgtgaattcaactcacagagtggaaccttcctttaacagagcagttttgaaacactctttttgtagaatctgcaagtagatatttggagcgctttgaggccttcgttggaaaccggaatgtcttcacataaaaagtagatagagtcattctcagaaacttttttgtgatatgtagattcaactcacagcgttgaacctttcttttgatagagcagttttgaaaaactcttttatcgagtctgcaagtagacatttggagtgctttgagggctgtggtcgaaaaggaaatatcttcacatagaaactagactgaagcattctcagcaacttctttgtgacgtttgcattcatctcacagtgttgaacataccttttcatagagcagttttgagacactatttttgtagtatctgcaagtggatatttggactgctttgaggccttcattggaaacgggaatatcttcacataaacactagacagaagcattctctgaaacttctttgtgatgtgtgtattcaactcacagagttgaaccatcttttttatggagcggttttgaaacagtgtttttgtagaatcagcaagtggatattgggagcgctttgaggcctctggtggaaagggaatgtcttcacataaaaactggacagaagcattctcagaaacatctttgtgatgtttgcattcaactcacagagttgatccttccttttaatagggcagttttgcatcactctttttgtagaatgcaccagtgggcttttggagcacgtcaagggctatggtgaaaaaggaaatatcttcacataaaaactagacagaagtattctgtaaaactcctttgtgatgtttgcattcaactcagaaagttgaacttctctttatatagtccagttttcaaacactatttttgtagaatctgcaagtggatactgggactgctttgaggccttcgttggaaacgggtatcttcacataaaaactagactgaaggattcttagaaacttctttgtgatgtgtgcattcaactcaccgagtggaacctcacttttgatagagcagtgttgaaagacacttgttgtagaatctgcaggtggatatttggagtgctttgaagccttccttggaaacgggaatatcttcacataaaaactagacataagcattctcagaaacttctttgtgatctgtccattcaactcacagagttgaaccttcctttttatggagcagttttgaaacactgtttttggagaatctgcaagtggatatttggagcacttttaggcctatggtagaaaaagaaatatctgcctattacaactagactgaagcattctcagaaactgctttgtgatatgtgcattcgactctccgagttgaaacttttttttgatagagcagttttgaaacactctgtagaatctgaaagtggatatttggagctctttgagggctatggcggaaaagaaaatatattcacattaaactagacagaagcatcctcagaaacttctttatgatgtttgcattcaactcacagagttgaacatacctttccatagagcagttttgaaacactctttttggggaatccgcaagtggatatttggaccgctttgagacctttgctggaaatgggaatatcttcacatataaactagacagaagcattcttggaaacttcttcgtgatgtgtgcattctgctcccaaagttgaacgttccttttcataaagcagttttgaaacactcttttgtacaatctaccattggatatgtggaaggctttgatgcccatggtagaaaaggaaacatcctcatataaaatctagacagaaggattcacagaaactgctttgtgatgtcagcattcaaatcacagagttgaacctttcttttgttagagcagttttgaatcgctgtttctgtggaatctgccagtggacatttggagcccattgagggcaattgtggagaaggaaatatcttacataaaaactagaaagaagcattctcagaaacatctatgtgaagtgtgccttcaacacacagagttgaaccttccctttgacagaacagttttgaaactcacttttgtacaattgcaggtgaatatttggagcgccttgaagcctttgttggaagtgggaatatcttcacatacaaactagccagaagcattctcagaaacttctttgtgatgtgtgcattgaacccagagagatgaacctttcctttgatagagcagttttgaaacgtgtttctgtaagatctgcaagtggatatttggggcgctttgagtcctttggtggaaacgggaatatcttctaataaaaactagacagaaatattctcagaatcttctttgtgatgtgggcattcaactaacacagttgaacatttcttgtgacagagcagttttgaaacactctttttgtagaatctgccagtggatatttggagcgctttcagggctattgcacaaatggaaaagtcttcacataaaaactagacagaagcattctcagaaacttctttgtgatgtttgcattcaaataccagagttgaacctccctcttcatagagcagttttgaaatcctctttttgtagaatctgcaagtggatatttggaccactttgaggccttcataggaaacagtactatcttcacataaaaactagatagaagcattctcagaaacttctttgtgatgtgtgaatttaactgagagagttgaaccttgctttaatagagcagttttgaaacactctttttgtagaatctgcaagtagatatttggagcgctttgagaccttcgttggaaaccggaatatcttcacataaaaagtagatagaggcattctcagaaacttttttgttatatgtagattcaactcacagtgttgaagctttcttttgatagagcagtttttaagaactcttttatcgaatctgcaagtagacatttggagtgctttgagggctgtagtcgaaaaggaaatatcttcacatagaaactagactgaagcattctcagcaacttctttgtgacgtttgcattcatctcacagtgttgaacataccttttcatagagcagttttgaaacactatttttgtagtatctgcaagtggatatttggactgctttgaggcctcattggaaacgggaatatcttcacataaacactagacagaagcattctctgaaacttctttgtgatgtgtgtattcaactcacagagttgaaccatcttttttatggagcggttttgaaacagtgtttttgtagaatcagcaagtggatattgggagcgctttgaggcctctggtggaaagggaatgtcttcacataaaaactggacagaagcattctcagaaacatctttgtgatgtttgcattcaactcacagagttgatccttccttttaatagggcagttttgcaacactctttttgtagaatgcaccagtgggcttttggagcacgtcaagggctatggtgaaaaaggaaatatcttctcataaaaactagactgaagtattctgtaaaactcctttgtgatgtttgcattcaactcagaaagttgaacttctctttatatagtccagttttcaaacactatttttgtagcatctgcaagtggatactgggactgctttgaggccttcgttggaaacgggattacccgtcacatagaaactagactgaaggattcttagaaacttctttgtgatgtgtgcattcaactcaccgagtggaacctcacttttgatagagcagtgttgaaagacacttgttgtagaatctgcaggtggatatttggagtgctttgaaaccttccttggaaacgggaatatcttcacataaaaactagacataagcattctcagaaacttctttgtgatctgtccattcagctcacagagttgaaccttccttttgatagagcagttttgaaacactctttctgtagagtctgcaagtggatatcaggagcgctttgaggcctatggtagaaaaagaaatatctgcatataaaaactagacagaagcattctgagaaacttctttgtgatgtttgcattcaactaccagagttgaaccttccttttgatagagcagttttgaaacactctttgtgtagaatctgcatgtggatatcaggagcgctttgaggcctatggcagaaaaagaaatatctggctctaaaaactagacagaagcattctcagcaaactactttgagatatgtgcattcaactcacagagttgaaacttttttttgatagagcagttttgaaacactctgtagaatctgaaagtggatatttggagctatttgagggctatggtggaaaagaaaatatattcccattaaactagacagaagcatcctcagaaacttctttatgatgtttgcattaaactcacagagttgaacatacctttccatagagcagttttgaaacactctttttggggaatccgcaagtggatatttggaccgctttgagacctttgctggaaatgggaatatcttcacatataaagtagacagaaccattctcagaaactgctacgtgatgtgtgcattcaactcacagagttgaaccttccttttcataaagcagttttgaaacactccttttgtacaatctacaattggatatttggaacgctttgatgcccgtggtagaaaaggaaatctcctcatataaaaactagacagaaggattcacagaaactgctgtgtgatgtgtgcatccaaatcacggagttgaacttttcttttgttagagcagttttgaaaccccgtttccgtggaatctgccagtggacatttggagcgcattgagggctatggtggagaaggaaatatcttcacataaaaactagaaaggaagcattctcagaaacatctatgtgaagtatgcattcaactcacagagttgaaccttccttttgatagaagagttttgaaacactcttttgtacaattgcaggtgaatatttggagcgctttgaagcctttgttggaaatgggaatatcctcacattaaaaactagccagaaacattctcagaaacttctttgtgatgtgtgcattgaacccagagagatgaaccgttcctttgagagagcagttttgaaacgtgtttttgtaagatctgcaagtggatatttggggcgctttgagtccttaggtggaaacgggaatatcttcgaataaaaactagacagaattattctcagaatcttctttgtgatgtgggcattcaactaacacagttgaacatttcttttgacagagcagttctgaaacactctttttgtagaatccgccagtggatatttggagcgctttgagggctattgtgcaaatggaaatatcttcaactaaaaactagaccgaagcattctcagaaactgctttgtgatgtttgcattcaactcacagagttgaacctacctcttcatagagcagtttggaaaacctcttcttgtagaatctgcaagtggatattcggaccactttgaggccttcataggaaacagtaatatcttcacataaaaactagatagaagcattctcggaaacttcttagtgatgtgtgaattcaactcacagagttgaaccttcgttaaatagagcagttttgaaacactctttttgtggaatctgcaatagatatttggagcgctttgaggccttcgttggaaaccggaatgtcttcacataaaaagtagatagaggcattctcagaaacttttttgtgatatgtagattcaactcacagtgttgaacctttcttttgattgagctgttttgaaaaactcttttatcgaatctgtaagtagacatttggagtgctttgagggctgtggtcgaaaaggaaatatcttcccatagaaactagactgaagcattctcagcaacttcttggtgacgtttgcattcatctcacagtgttgaacataccttttcatagagcagttttgaaacactatttttgtagtatctgcaagtggatatttggactgctttgaggccttcattggaaacgggaatatcttcacataaacactagacagaagcattctctgaaacttctttgtgatgtgtgtattcaactcacagagatgaaccatcttttttatggagcggttttgaaacagtgtttttgtagaatcagcaagtggatattgggagcgctttgaggcctctggtggaaagggaatgtcttcacataaaaactggacagaagcattctcagcaacatctttgtgatgtttgcattcaactcacagagttgatccttccttttaatagggcagttttgcaacactctttttgtagaatgcaccagtgggcttttggagcacgtcaagggctatggtgaaaaaggaaatatcttcacataaaaactagacagaagtattgtgtaaaactcctttgtgatgtttgcattcaactcagaaagttgaacttctctttatatagtccagttttcaaacactatttttgtagaatctgcaagtggatactgggactgctttgaggccttcattggaaacgggattatcttcacataaaaactagactgaaggattcttagaaacttctttgtgatgtgtgcattcaactcaccgagtggaacctcacttttgatagagcagtgttgaaagacacttgttgtagaatctgcaggtggatatttggagtgctttgaagccttccttggaaacgggaatatcttcacataaaaactagacataagcattctcagaaacttctttgtgatctgtccattcaactcacagagttgaaccttcgttcatatggagccgttttgaaccactgtttttgtagaatctgcaagtggatatttggagcgctttgaggcctatggtagaaaaggaaatatctgcctctaaaaactagacagaagcattctcagaaacttgtttgtgatgtttgccttcaacttccagagttgaaccttccttttgatagagcagttttgaaacactctttttgtagaatctgcatgtggatatctggagcgatttttgaggcctatggtcaaaaaggaaatatcttcctatgaaaaatagacaaaagcattctcagaaactactttgagatatgtgcatttaacccacagagttgaaacttttttttgatagagcagttttgaaacactctgtaaaatctgaaagtggatatttggagctatttgagggctatggtggaaaagaaaatatattcccattaaactagacagaagcatcctcagaaacttctttgtgatgtttgcattaaactcacagagttgaacatacctttccatagagcagttttgaaacactctttttggggaatccgcaagtggatatttggaccgctttgagacctttgctggaaatgggaatatcttcacatataaactagacagaagcattctcggaaacttctttgtgatgtgtgcattctgctcccaaagttgaaccttcctcttcataaagcagttttgaaacactcttttgtacaatctaccattggatatgtggaaggctttgatgcccatggtagaaaaggaaacatcctcatataaaatctagacagaaggattcacagaaactgctgtgtgatgtgtgcatccaaatcacggagttgaacgtttcttttgttagagcagttttgaaaccctgtttccgtggaatctgccagtggacatttggagcgcattgagggctatggtggagaaggaaatatcttcacataaaaactagaaagaagcattctcagaaacatctatgtgaagtgtgcattcaactcacagagttgaaccttccttttgatagaagagttttgaaacactcttttgtacaattgcaggtgaatatttggagcgcttagaagcctttgttggaaatgggaatatcctcacataaaaactagccagaagcattctcagaaacttctttgtgatgtgtgcattgaacccagagagatgaaccgttcctttgagagagcagttttgaaacgtgttcttgtaagatctgcaagtggatatttggggcgctttgagcccttaggtgtaaacgggaatatcttcgaataaaaactagacagaattattctcagaatcttctttgtgatgtgggcattcaactaacacagttgaacatgtcttttgacagagcagttctgaaacactctttttgtagaatccgccagtggatatttggagcgctttgagggctattgtgcaaatggaaatatcttcacctaaaaactagaccgaagcaatcccagaaactactttgtgatgtttgcattcaactcacagagttgaacctacctcttcatagagcagtttggaaaacctctttttatagaatctgcaagtggatatttggaccactttgaggccttcataggaaacagtactatcttcacataaaaactaggtagaagcattctcagaaacttctttgtgatgtgtgaattcaactcacagagttgaaccttcctttaatagagcagttttgaaacactctttttgtagaatctgccagtagatatttggagcgctttgaggccttcgttggaaaccggaatatcttcacataaaaagtagatagaggcattctcagaaacttttttgtgatatgtagattcaactgacagcgttgaacctttcttttgatagagcagttttgaaaaactcttttctcgaatctgcaagtagacatttggagtgctgtgagggctgtggtccaaaaggaaatgtcttcacaaagaaaccagactgaagcattctcagcaacttctttgtgacgtttgcattcatctcacagtgttgaacataccttttcatagagcagttttgagacactatttttgtagtatctgcaagtggatatttggactgctttgaggccttcattggaaatgggaatatcttcacataaacactagacagaagcattctctgaaacttctttgtgatgtgtgtattcaactcacagagttgaaccatcttttttatggagcggttttgaaacagtgtttttgtagaatcagcaattggatattgggagcgctttgaggcctctggtggaaagggaatgtcttcacataaaaactggacagaagtattctcagaaacatctttgtgatgtttgcattcaactcacagagttgatccttcctttcaatagggcagttttgcaacactctttttgtagaatgcaccagtgggcttttggagcacgtcaagggctatggtgaaaaaggaaatatcttcacataaaaattagacagaagtattctgtaaaactcctttgtgatgtttgcattcaactcagaaagttgaacttctctttatatagtccagttttcaaacactatttttgtagaatctgcaagtggatactgggactgctttgaggccttcattggaaacgggattatcttcacataaaaactagactgaaggattcttagaaacttctttgtgatgtgtgccttcaactcaccgagtggaacctcacttttgatagagcagagttgaaagacacttgttgtagaatctgcaggtggatatttggagtgttttgaagccttccttggaaacgggaatatcttcacataaaaactagacataagcattctcagaaactcctttgtgatctgtccattcagctcacagagttgaaccttccttttgatagagcagttttgaaacactctttctgtagagtctgcaagtggatatcaggagcgctttgtcgcctatggcagaaaaagaaatatctggctctaaaaactagacagaagcattctgagaaacttctttgtgatgtttgcattcaactaccagagttgaaccttccttttgatagagcagttttgaaacactctttgtgtaggatctgcatgtggatatcaggagcgctttgaggcctatggcagaaaaagaaatatctggctctaaaaactagacagaagcattctcagaaactactttgtgttatgtgcattcaactcacagagttgaaccttttttttgatagagccgttttgaaacactctgtagaaactgaaagtggatatttggagctatttgagggctatggtggaaaagaaaatatattcacattaaactagacagaagcattctcagaaacttctttatgatgtttgcattaaactcacagagttgaacatacctttccatagagcagttttgaaacactctttttgtggaatccgcaagtggatatttggaccgctttgagaccttcgctggaaatgggaatatcttcacatacaaattagacagaagcattctcggaaacttcttcgtgatgtgtgcattctgctcccaaagttgaaccttcctcttcataaagcagttttgaaacactcttttgtacaatctaccattggatatggggaaggctttgatgcccatggtagaaaaggaaacatcctcatataaaatctagacagaaggattcacagaaactgctgtgtgatgtgtgcatcgaaatcacggagttgaacttttcttttgttagagcagttttgaaaccctgtttccgtggaatctgccagtggacatttggagcacattgagggctatggtggagaaggaaatatcttcacataaaaactagaaagaagcattctcagaaacatctatgtgaagtgtgcattcaactcacagagttgaaccttccttttgatataagagttttgaaacactcttttgtacaattgcaggtgaatatttggagcgctttgaagcctttgttggaaatgggaatatcctcacataaaaactagccagaagcattctcagaaacttctttgtgatgtgtgcattgaacccagagagatgaaccgttcctttgagagagcagttttgaaacgtgttcttgtaagatctgcaagtggatatttggggcgctttgagccgttaggtgtaaacgggaatatcttcgaataaaaactagacagaattatctcagaaccttctttgtgatgtgggcattcaactaacacagttgaacatttcttttgacagagcagttctgaaacactctttttgtagaatccgccagtggatatttggagcgctttgagggctattgtgcaaatggaaatatcttcacctaaaaactagaccgaagcaatcccagaaactactttgtgatgtttgcattcaactcacagagttgaacctacctcttcatagagcagtttggaaaacctctttttgtagaatctgcaagtggatattcggaccactttgaggccttcataggaaacagtactatcttcacataaaaactaggtagaagcattctcagaaaattctttgtgatgtgtgaattcaactcacagagttgaaccttcctttaatagagcagttttgaaacactctttttgtagaatctgcaagtagatatttggagcgctttgaggccttcgttggaaaccggaatatcttcacataaaaagtagatagaggcattctcagaaagttttttgtgatatgtagattcaactcacagcgctgaacctttcttttgatagagcagttttgaaaaactcttttatcgaatctgcaagtagacatttggagtgctttgagggctgtggtcgaaaaggaaatatcttcacatagaaactagactgaagcattctcagcaacatctttgtgatgtttgcattcatctcacagtgttgaacataccttttcatagagcagttttgaaacactatttttgtagtatctgcaagtggatatttggactgctttgaggccttcattggaaacgggaatatcttcacataaacactagacagaagcattctctgaaacttctttgtgatgtgtgtattcaactcacagagttgaaccatcttttttatggagcggttttgaaacagtttttgtagaatcagcaattggatatttggagtgctttgaggcctctggtggaaagggaatgtcttcacataaaaactggacagaagcattctcagaaacatctttgtgatgtttgcattcaactcacagagttgatccttccttttaatagggcagttttgcaacactctttttgtagaatgcaccagtgggcttttggggcacgtcaagggctatggtgaaaaaggaaatatcttcacataaaaactagacagaagtattgtgtaaaactcctttgtgatgtttgcattcaactcagaaagttgaacttctctttatatagtccagttttcaaacactatttttgtagaatctgcaagtggatactgggactgctttgaggctatcgttggaaacaggattatcttcacataaaaactagactgaagcattctcagcaacttctttgtgacgtttgaattcatctcacagtgatgaacataccttttcatagagcagttttgaaacactatttttgtagaatctgcaattggatatttggactgcgttgagcccctcactggaaacgggaatatcttcacataaaaactagacagatgtattctcagaaacttccttgtgatctgtccattaaactcacagagttgaaccttccgttttatggagccgttttgaaacactgtttttgtagaatctgcaagtggatatttggagcgctttgaggcctaaggtagaaaaagaaatatctgcatataaaaactagacagaagcattctgagaaacttctttgtgatgtttgcattcaactaccagagttgaaccttccttttgatagagcagtttcgaaacactctttttgtagaatctgcatgtggatatctggagcgatttgaggcctatggtcaaaaaggaaatatcttcctatgaaaaacagacaaaaacattctcagaaactactttgtgttatgtgcattcaactcacagagtagaaccttttttttgatatagccgttttgaaacgctctgtagaaactgaaagtggatatttggagctatttgagggctatggtggaaaagaaaatatattcacattaaactagacagaagcatcctcagaaacttctttatgatgtttgcattaaactcacagagttgaacatacctttccatagagcagttttgaaacactgtttttggggaatccgcaagtggatatttggaccgctttgagacctttgctggaaatgggaatatcttcacatataaactagacagaagcattttcggaaacttcttcctgatgtgtgcattctgctcccaaagttgaaccttcctcttcataaagcagttttgaaacactcttttgtacaatctaccattggatatgtggaaggctttgatgcccatggtagaaaaggatacatcctcatataaaatctagacagaaggattcacagaaactgctgtgtgatgtgtgcatccaaatcacggagttgaacttttcttttgttagagcagttttgaaaccctgtttccgtggaatctgccagtggacatttggagcgcattgagggctatggtggagaaggaaatatcttcacataaaaactagaaagaagcattctcagaaacacctatgtgaagtgtgcattcaactcacagagttgaaccgttcttttgatagaagagttttgaaacactcttttgtacaattgcaggtgaatatttggagcgctttgaagcatttgttggaaatgggaatatcctcacataaaaactagccagaaacattctcagaaacttctttgtgatgtgtgcattgaacccagagagatgaaccgttcccttgagagagcagttttgaaacgtgtttttgtaagatctgcaagtggatatttggggcgctttgagtccttaggtggaaacgggaatatcttcgaataaaaactagacagaattattctcagaatcttctttgtgatgtgggcattcaactaacacagttgaacatttcttttgacagagcagttctgaaacactctttttgtagaatccgccagtggatatttggagcgctttgagggctattgtgcaaatggaaatatcttcacctaaaaactagaccgaagcaatcccagaaactactttgtgatgtttgcattcaactcacagagttgaacctacctcttcatagagcagtttggaaaacctctttttgtagaatctgcaagtggatatttggaccacattgaggccttcataggaaacagtactatcttcacataaaaactaggtagaagaattctcagaaagttctttgtgatgtgtgaattcaactcacagagttgaaccttcctttaatagagcagttttgaaacactctttttgtagaatctgccagtagatatttggagcgctttgaggccttcgttggaaaccggaatatcttcacataaaaagtagatagaggcattctcagaaacttttttgtgatatgtagattcaactcacagcgctgaacctttcttttgatagagcagttttgaaaaactcttttatcgaacctgcaagcagacatttggagtgctttgagggctgtggtcgaaaaggaaatatcttcacatagaaactagacagaagcattctcagcaacttctttgtgacgtttgcattcatctcacagtgttgaacataccttttcatagagcagttttgaaacactatttttgtagtatctgcaagtggatatttggactgctttgaggccttcattggaaacgggaatatcttcacatatactctagacagaagcattctctgaaacttctttgtgatgtgtgtattcaactcacagagttgaaccatcttttttatggagcggttttgaaacagtgtttttgtagaatcagcaagtggatatttggagcgctttgaggcctctggtggaaagagaatgtcctctcataaaaactggacagaagcattctcagaaacatctttgtgatgtttgcattcaactcacagagttgatccttccttttaatagggcagttttgcaacactctttttgtagaatgcaccagtgggcttttggagcacgtcaagggctttggtgaaaaaggaaatatcttcacataaaaactagacagaagtattctgtaaaactcctttgtgatgtttgcattcaactcagaaagttgaacttctctttatatagtccagttttcaaacactatttttgtagaatctgcaagtggatactgggactgctttgaggccttcgttggaaacgggattatcttcacatagaaactagactgaaggattcttagaaacttctttgtgatgtgtgccttcaactcaccgagcggaacctcacttttgatagagcagagttgaaagacacttgttgtagaatctgcaggtggatatttggagtgttttgaagccttccttggaaacgggaatatcttcacataaaaactagacataagcattctcagaaacccctttgtgatctgtccattcagctcacagagttgaaccttccttttgatagagcagttttgaaacactctttctgtagagtctgcaagtggatatcaggagcgctttgaggcctatggtagaaaaagaaatatctgcatataaaaactagacagaagcattctgagaaacttctttgtgatgtttgcattcaactaccagagttgaaccttccttttgatagagcagttttgaaacactctttttgtagaatctgcatgtggatatctggagcgatttgaggcctatggtcaaaaaggaaatatcttcctatgaaaaacagacaaaagaattctcagaaactacttagagatatgtgcattcaactcacagagttgaaacttttttttgatagagcagttttgaaacactctgtagaatctgaaagtggatatttggagctatttgagggctatggtggaaaagaaaatatattcccattaaactagacagaagcatcctcagaaacttctttatgatgtttgcattaaactcacagagttgaacatacctttccatagagcagttttgaaacactctttttggggaatccgcaagtggatatttggactgctttgagacctttgctggaaaagggaatatcttcacatataaactagacagaagcattctcagaaacttcttcgtgatgtgtgcattctactcccaaatttgaatcttccttttcatgaagcagttttgaaacactctatttgtgcattctacaattggatgattggaacgctttgatgcccatggtagaaaaggaaatatcctcatataaaaactagacagaaggattcacagaaactgctttgtgatgtgtgcattcaaatcacggagttggacctttcttttgttagagcagttttgaaacactgtttctgtggaatctgccagtggacatttggagcgcattgagggctatggtggagaaggaaatatcttcacagaaaaactagaaagaagcattctcagaaacatttatgtgaagcgtgcattcaactcacagagttgaaccttccttttgatagaacagttttgaaacactcttttgaacaattgcaggtgaatctttggagcgctttgaagcctttgttggaaatgggaatatcttcacacacaaactagccagaagtactctcagaaacttctttgtgatgtgtgcattgaacccagagagatgaaccgttcctttgagagagcagttttgaaacgtgtttttgtaagatctgcaagtggatatttggggcgctttgagcccttaggtggaaacgggaatatcttcgaataaaaactagacagaattattctcagcaatcttctttgtgatgtgggcattcaactaacacagttgaacatttcttttgacagagcagttctgaaacactctttttgtagaatccgccagtggatatttggagcgctttgagggctattgtgcaaacggaaatatcttcacctaaaaactagaccgaagcattctcagaaactactttgtgatgtttgcattcaactcacatagttgaacatacctcttcatagagcaggtttgaaaacttctttttgtattatctgcaagtggatatttggaccactttgaggccttcataggaaacagtaatatattctcataaaaactcgatagaagcattctcagaaacttctttgtgatgggtgaattcaactcacagtgttgaaccttcctttaatagagcagttttgaaacactctttttgtagaatctgccagtagatatttggagcgctttgaggccttcgttggaaaccggaatatcttcacataaaaagtagatagaggcattctcagaaacttttttgtgatatgtagattcaactcacagcgctgaacctttcttttgatagagcagttttgaaaaactattttatcgaatctgcaagtagacatttggagtgctttgagggctgtggtcgaaaaggaaatatcttcacatagaaactagactgaagcattctcagcaacttctttgtgacgtttgaattcatctcacagtgttgaacataccttttcatagaacagttttgaaacactatttttgtagaatctgcaattggatatttggactgcgttgagcccctcactggaaacgggaatatcttcacataaaaactagacagaagcattctctgaaacttctttgtgatgtgtgtattcatctcacagagttgaaccatcttttttatggagcggttttgaaacagtgtttttgtagaatcagcaattggatatttggagcgctttgaggcctctggtggaaagggaatgtcttcacataaaaactggacagaagcattctcagaaacatctttgtgatgtttgcattcaactcacagagttgatccttccttttaatagggcagttttgcaacactctttttgtagaatgcaccagtgggcttttggagcacgtcaagggctatggtgaaaaaggaaatatcttcacataaaaactagacagaagtattctgtaaaactcctttgtgaagtttgcattcaactcagaaagttgaacttctctttatatagtccagttttcaaacactatttttgtagaatctgcaagtggatactgggactgctttgaggccttcgttggaaacgggattatcttcacataaaaactagactgaagcattctcagcaacttctttgtgacgtttgcattcatctcacaatgttgaacatactttttcatagagcagtattgaaacactctttttgtaaaatctgcatttggatatttggactgcgttgaggccttcactggaaacgggaatttcttcacataaacactagacagaagcattctcagaaacttctttgtgatctgtccattcaactcacagagttgaaccttcgttcatatggagccgttttgaaccactgtttttgtagaatctgcaagtggatatttggagcgctttgaggcctatggtagaaaaggaaatatgtgcctctaaaaactagacagaagcattctgagaaacttctttgtgatgtttgcattcaactaccagagttgaaccttcctttttgatagagcagttttgaaacactctttttgtagaatctgcatgtggatatctggagcgatttgaggcctatggtcaaaaaggaaatatcttcctatgaaaaacagacaaaatcaatctgaggaacttctttgtgatgtgtgcattcgtcccacagagttaaacctttcttttgattgagaagttttgagactctttttgtagtacctggaagtggacatttcgaaggccttgaggcctatggtggaaaaggaaatatcttctcataaaaactagactgaagcatcctcagaaacttctttatgatgtttgcattaaactcacagagttgaacatacctttccatagagcagttttgaaacactctttttggggaatccgcaggtggatatttggaccgctttgagacctttgctggaaacgggaatatcttcacatataaactagacagaagcattctcggaaacttcttcatgatgtctgcattctgctcccaaagttgaaccttccttttcataaagcagttttgaaacactcttttgtacaatctaccattggatatgtggaaggctttgatgcccatggtagaaaaggaaacatcctcatataaaatctagacagaaggattcacagaaactgctgtgtgatgtgtgcatccaaatcacggagttgaacttttcttttgttagagcagttttgaaaccctgtttccgtggaatctgccagtggacatttggagcgcattgagggctatggtggagaaggaaatatcttcacataaaaactagaaagaagcattctcagaaacatctatgtgaagtgtgcattcaactcacagagttgaaccttccttttgatagaagagttttgaaacactcttttgtacaattgcaggtgaatatttggagcgctgtgaagcctttgttggaaatgggaatatcctcacataaaaactagccagaagcattctcagaaacttctttgtgatgtgtgcattgaacccagagagatgaaccgttcctttgagagagcagttttgaaacgtgtttttgtaagatctgcaagtggatatttggggcgctttgagtccttaggtggaaacgggaatatcttcgaataaaaactagacagaattattctcagaatcttctttgtgatttgggcattcaactaacacagttgaacatgtcttttgacagagcagttctgaaacactctttttgtagaatccgccagtggatatttggagcgctttgaggggtattgtgcaaatggaaatatcttcacctaaaaactagaccgaagcaatcccagaaactactttgtgatgtttgcattcaactcacagagttgaacctacctcttcatagagcagtttggaaaacctctttttgtagaatctgcaagtggatatttggaccactttgaggccttcataggaaacagtactatcttcacataaaaactaggtagaagcattctcagaaacttctttgtgatgtgtgaattcaactcacagagttgaaccttcctttaatagagcagttttgaaacactctttttgtagaatctgcaagtagatatttggagcgcttagaggccttcgttggaaaccggaatatcttcacatagaaagtagatagaggcattctcagaaacttttttgtgatatgtagattcaactcacagcgttgaacctttcttttgatagagcagttttgaaaaactcttttatcgaatctgcaagtagacatttggagtgctttgagggctgtggtcgaaaaggaaatatcttcacatagaaactagactgaagcattctcagcaacttctttgtgacgtttgcactcatctcacaatgttgaacatactttttcatagagcagtattgaaacactctttttgtaaaatctgcatttggatatttggactgcgttgaggccttcactggaaacgggaatttcttcacataaacactagacagaagcattctctgaaacttctttgtgatgtgtgtattcaactcacagagttgaaccatcttttttatggagcggttttgaaacagtgtttttgtagaatcagcaattggatatttggagcgctttgaggcctctggtggaaagggaatgtcttcacataaaaactggacagaagcattctcagaaacatctttgtgatgtttgcattcaactcacagagttgatccttccttttaatagggcagttttgcaacactctttttgtagaatgcaccagtgggcttttggagcacgtcaagggctatggtgaaaaaggaaatatcttcacataaaaactagaccgaagtattctgtaaaactcctttgtgatgtttgcattcaactcagaaagttgaacttctctttatatagtccagttttcaaacactatttttgtagcatctgcaagtggatactgggactgctttgaggccttcgttggaaacgggattaccttcacatagaaactagactgaaggattcttagaaacttctttgtgatgtgtgccttcaactcaccgagtggaacctcacttttgatagagcagagttgaaagacacttgttgtagaatctgcaggtggatatttggagtgctttgaagccttccttggaaacgggaatatcttcacataaaaactagacataagcattctcagaaactcctttgtgatctgtccattcagctcacagagttgaaccttccttttgatagagcagttttgaaacactctttctgtagagtctgcaagtggatatcaggagcgctttgaggcctatggtagaaaaagaaatatctgcatataaaaactagacagaagcattctcagaaacttctttgtgatgtttgcattcaactaccagagttgaaccttccttttgatagagcagttttgaaacactctttttgtagaatctgcatgtggatatctggagcgatttttgagtcctatggtcaaaaaggaaatatcttcctatgaaaaatagacaaaagcattctcacaaagtgctttgtgatatgtgcattcgactcaccgagttgaaacttttttatgatagagcagttttgaaacactctgtagaatctgaaagtggatatttggagctcttcgagggctatggcggaaaagaaaatatattcacattaaactagacagcagcattctcagaaacatctttaggatgtttgcagtaaactcacagagttgaacatacctttccgtaaagcagttttgaaaccctctgtttgtgggatctgcaagtggatatttggaccgctttgagacctttgctggaaatgggaatatcttcacatataaactagacagaagcattctcggaaacttcttcatgatgtgtgcattctgctcccaaagttgaaccttccttttcataaagcagttttgaaacactcttttgtacaatctaccattggatatgtggaaggctttgatgcccatggtagaaaaggatacatcctcatatgaaaatctagacagaaggattcacagaaactgctgtgtgatgtgtgcatccaaatcacggagttgaacttttcttttgttagagcagttttgaaaccccgtttccgtggaatctgccagtggacatttggagcgcattgagggctatggtggagaaggaaatatcttcacataaaaactagaaagaagcattctcagaaacatctatgtgaagtgtgcattcaactcacagagttgaaccttccttttgatagaagagttttgaaacactcttttgtacaattgcaggtgaatatttggagcgctttgaagcctttgttggaaatgggaatatcctcacataaaaactagccagaagcattctcagaaacttctttgtgatgtgtgcattgaacccagagacatgaacctttcctttgatagagcagttttgaaacgtgtttctgtaagatctgcaagtggatatttggggcgctttgagtcctttggtggaaacgggaatatcttctaataaaaactagacagtattattctcagaatcttctttgtgatgtgggcattcaactaacacagttgaacatgtcttttgacagagcagttctgaaacactctttttgtagaatccgccagtggatatttggagcgctttgaggggtattgtgcaaatggaaatatcttcacctaaaaactagaccgaagcaatcccagaaactactttgtgatgtttgcattcaactcacagagttgaacctacctcttcatagagcagtttggaaaacctctttttgtagaatctgcaagtggatatttggaccactttgaggccttcataggaaacagtactatcttcacataaaaactaggtagaagcattctcagaaacttctttgtgatgtgtgaattcaactcacagagttgaaccttcctttaatacagcagttttgaaacactctttttgtagaatctgccagtagatatttggagcgctttgaggccttcgttggaaaccggaatatcttcacataaaaagtagatagaggcattctaagaaacatttttgtgatatgtagattcaactcacagcgttgaacctttcttttgatagagcagttttgaaaaactcttttatcgaatctgcaagtagacatttggagtgctttgagggctgtggtcgaaaaggaaatatcttcacatagaaactagactgaagcattctcagcaacttctttgtgacgtttgcattcatctcacagtgttgaacataccttttcatagagtagttttgaaacactatttttgtagaatctgcaagtggatatttggactgcattgaggccttcattggaaacgggaatgtcttcacataaacactagacagaagaattctgagaaacttccttctgatgtgtgcgttcatctcacagagtcgaacaattgttttgattgagcagtttggaaacactctttttgtagaatctgcaagtggacatttggagtgctttgtagcctacggcagaaaaggtaatgtcttcacatgaaatctagacagaagcattctcagaaacatctttgtgatgttgcattcaactcacagagttgatccttccttttaatagggcagttttgcaacactctttttgtagaatgcaccagtgggcttttggagcacgtcaagggctatggtgaaaaaggaaatatcttcacataaaaactagacagaagtattctgtaaaactcctttgtgatgtttgcattcaactcagaaagttgaacttctctttatatagtccagttttcaaacactatttttgtagaatctgcaagtggatactgggactgctttgaggccttcgttggaaacgggattatcttcacataaaaactagactgaaggattcttagaaacttctttgtgatgtgtgcattcaactcaccgagtggaacctcacttttgatagagcagtgttgaaagacacttgttgtagaatctgcaggtggatatttggagtgctttgaagccttccttggaaacgggaatatcttcacataaaaactagacataagcattctcagaaactcctttgtgatctgtccattcagctcacagagttgaaccttccttttgatagagcagttttgaaacactctttctgtagtgtctgcaagtggatatcaggagcgctttgaggcctaggcagaaaaagaaatatctgtatataaaaactagacagaagcattctgagaaacttctttgtgatgtttgcattcaactaccagagttgaaccttcctttttgatagagcagttttgaaacactctttgtgtagaatctgcatgtggatatctggagcagatttgaggcctatggtcaaaaaggaaatatcttcctatgaaaaacagacaaaagaaatctgagaaaatactttttgatgtgtgtgttcatctcacagacttgaatcttttttttgattgagcagtttggaaatactctgttttctagaatctgcaagtggacatttggaacgctttgcggcttaaggtagaaaaggaaatatcttcaaataaaatctagacagaagcatcctcagaaacttctttatgatgtttgcattaaactcacagagttgaacatacctttccatagagcagttttgaaacactctttttgaggaatccgcaagtggatatttggaccgctttgagacctttgctggaaatgggaatatcttcacatataaactagacagaagcattctcggaaacttcttcgtgatgtgtgcattctgctcccaaagttgaaccttcctcttcataaagcagttttgaaacactcttttgtacaatctaccattggatatgtggaaggctttgatgcccatggtggaaaaggaaacatcctcatataaaatctagacagaaggattcacagaaactgctgtgtgatgtgtgcatccaaatcacggagttgaacttttcttttgttagagcagttttgaaaccctgtttccgtggaatctgccagtggacatttggagcacattgagggctatggtggagaaggaaatatcttcacataaaaactagaaagaagcattctgagaaacatctatgtgaagtgtgcattcaactcacggagttgaaccttccttttgatagaacagttttgaaacattcttttgtacaatttcaggtgaatatttggagcgcctttaagcctttgttggaaatgggaatatcttcacatacaaactagccagaagcactctcagaaacttctttgtgatgtgtgcattgaacccagagagatgaaccgttcctttgagagagcagttttgaaacgtgtttttgtaagatctgcaagtggatatttggggcgttttgagcccttaggtggaaacgggaatatcttcgaataaaaactagacagaaatattctcagaatctcctttgtgatgtgggcattcaactaacacagttgaacatttcttttcacagagcagttttgaaacactcttttggtagaatctgcatgtggatatttggagcgcttggagggctattgtgccaatggaaatatctgcccctgaaaactagacagaagcaatcccagaaactactttgtgatgtttgcattcaactcacagagttgaacctacctcttcatagagcagtttggaaaacctctttttgtagaatctgcaagtggatatttggaccactttgaggccttcataggaaacagtactatcttcacataaaaactaggtagaagcattctcagaaacttctttgtgatgtgtgaattcaactcacagagttgaaccttcctttaatagagcagttttgaaacactctttttgtagaatctgcaagtagatatttggagagctttgaggccttcgttggaaactggaatatcttcacataaaaagtagatagaggcattctcagaaatttttctgtgatatgtagattcaactcacagcgttgaacctttcttttgatagagcagttttgaaaaactcttttatcgaatctgcaagtagacatttggagtgctttgagggctgtggtcgaaaaggaaatatcttcacatggaaactagactgaagcattctcagcaacttctttgtgtcgtttgcattcatctcacagtgttgaacataccttttcatagagcagttttgaaacactcttcttgtagaatctgcaattggatatttggactgcgttgagacctccactggaaacgggaatatctccacataaacactagatagaagcattctctgaaacttctttgtgatgtgtgtattcaactcacagagttgaaccatcttttttatggagcggttttgaaacagtgttttttgtagaatcagcaattggatattgggagcgctttgaggcctctggtggaaagggaatgtcttcacataaaaactggacagaagcattctcagaaacatctttgtgatgtttgcattcaactcacagagttgatccttccttttaatagggcagttttgcaacactctttttgtagaatgcaccagtgggcttttggaacacgtcaagggctatggtgaaaaaggaaatatcttcacataaaaactagagagaaagtattgtgtaaaactcctttgtgatgtttgcattcaactcagaaagttgaacttctctttatatagtccagttttcaaacactatttttgtagaatctgcaagtggatactgggactgctttgaggccttcattggaaacgggattatcttcacataaaaactagactgaaggattcttagaaacttctttgtgatgtgtgcattcaactcaccgagtggaacctcacttttgatagagcagtgttgaaagacacttgttgtagaatctgcaggtggatatttggagtgctttgaagccttccttggaaacgggaatatcttcacataaaaactagacataagcattctctgaaacttctttgtgatgtgtctattcaactcacagagttgaaccttcctttttatggagcagttttgaaacactgtttttggagaatctgcaagtggatatttggagcgctttgaggcctatggtagaaaaagaaatatcttcatttaaatagtagacagaagcattctgagaaacttctttgtgatgtttgcattcaactaccagagttgaaccttccttttgatagagcagttttgaaacactctttgtgtagaatctgcatgtggatatctggagcgatttgaggcctatggtcaaaaaggaaatatcttcctatgaaaaacagacaaaagcattctcagaaactactttgagatatgtgcatttaactcacagagttgaaacttttttttgatagagcagttttgaaacactctgtaaaatctgaaagtggatatttggagctatttgagggctatggtggtaaagaaaatatattcccattaaactagacagaagcatcctcagaaacttctttatgatgtttgcattaaactcacagagttgaacatacctttccatagagcagttttgaaacactctttttggggaatccgcaagtggatatttggaccgctttgagacctttgctggaaatgggaatatcttcacatataaactagacagaagcattctcggaaacttcttcgtgatgtgtgcattctgctcccaaagttgaaccttcctcttcataaagcagttttgaaacactcttttgtacaatctaccattggatatgtggaaggctttgatgcccatggtagaaaaggatacatcctcatataaaatctagacagaaggattcacagaaactgctgtgtgatgtgtgcatccaaatcacggagttgaacttttcttttgttagagcagttttgaaaccctgtttccgtggaatctgccagtggacatttggagcgcattgagggctatggtggagaaggaaatatctccacataaaaactagaaagaagcattctcagaaacatctatgtgaagtgtgcattcaactcacagagttgaaccttccttttgatagaagagttttgaaacactcttttgtacaattgcaggtgaatatttggagcgctttgaagcctttgttggaaatgggaatatcctcacataaaaactagccagaagcattctcagaaacttctttgtgatgtgtgcattgaacccagagagatgaaccgttcctttgagagagcagttttgaaacgtgtttttgtaagatctgcaagtggatattaggggcgctttgagtccttaggtggaaacgggaatatcttcgaataaaaactagacagaattattctcagaaacttctttgtgatgtgggcattcaactaacacagttgaacatgtcttttgacagagcagttctgaaacactctttttgtagaatccgccagtggatatttggagcgctttgagggctattgtgcaaatgggaatatcttcacctaaaaactagaccgaagcaatcccagaaactactttgtgatgtttgcattcaactcacagagttgaacctacctcttcatagggcagtttggaaaacctctttttgtagaatctgcaagtggatatttggaccactttgaggccttcataggaaacagtactatcttcacataaaaactaggtagaagcattctcagaaacttctttgtgatgtgtgaattcaactcacagtgttgaaccttcctttaatagagcagttttgaaacactctttttgtagaatctgccagtagatatttggagcgctttgaggccttcgttggaaaccggaatatcttcacataaaaagtagatagaggcattctcagaaacttttttgtgatatgtagattcaactcacagcgctgaacctttcttttgatagagcagttttgaaaaactcttttatcgaatctgcaagtagacatttggagtgctttgagggctgtggtcgaaaaggaaatatcttcacatagaaactagactgaagcattctcagcaacttctttgtgacgtttgaattcatctcacagtgttgaacataccttttcatagagcagttttgaaacactatttttgtagaatctgcaattggatatttggacagcgttgaggccttcaatggaaacgggaatatcttcacataaaaactagacagaagcattctctgaaacttctttgtgatgtgtgtattcaactcacagagttgaaccatcttttttatggagcagttttgaaacagtgtttttgtagaatcagcaagtggatattgggagcgctttgaggcctctggtggaaagggaatgtcttcacataaaaactggacaaaagcattctcagaaacatctttgtgatgtttgcattcaactcacagagttgatccttccttttaatagggcagttttgcaacactctttttgtagaatgcaccagtgggcttttggagcacgtcaagggctatggtgaaaaaggaaatatcttcacataaaaactagacagaagtattctgtaaaactcctttgtgatgtttgcattcaactcagaaagttgaacttctctttatatagtccagttttcaaacactatttttgtagaatctgcaagtggatactgggactgctttgaggccttcgttggaaacgggtatcttcacataaaaactagactgaaggattcttagaaacttctttttgatgtgtgcattcaactcaccgagtggaacctcacttttgatagagcagtgttgaaagacacttgttgtagaatctgcaggtggatatttggagtgctttgaagccttccttggaaacgggaatatcttcacataaaaactagacataagcattctcagaaactcctttgtgatctgtccattcagctcacagagttgaaccttccttttgatagagcagttttgaaacactctttctgtagagtctgcaagtggatatcaggagcgctttgagacctatggcagaaaaagaaatatctggctctaaaaactagacagaagcattctgagaaacttctttgtgatgtttgcattcaactaccagagttgaaccttccttttgatagagcagttttgaaacattctttgtgtagaatctgcatgtggatatcaggagcgctttgaggcctatggcagaaaaagaaatatctggctctaaaaactagacagaagcattctcagaaactactttgagatatgtgcattcaactcacagagttgaaacttttttttgatagagcagttttgaaacactctgtagaatctgaaagtggatatttggagctttttgagggctatggtggaaatgaaaatatattcccattaaactagacagaaccatcctcagaaacttctttatgatgtttgcattaaactcacagagttgaacatacctttccatagagcagttttgaaacactctttttggggaatccgcaagtggatatttggaccgctttgagacctttgctggaaatgggaatatcttcacatataaactagacagaagcattctcggaaacttcttcgtgatgtgtgcattctgctcccaaagttgaaccttcctcttcataaagcagttttgaaacactcttttgtacaatctaccattggatatgtggaaggctttgatgcccatggtagaaaaggaaacatcctcatataaaatctagacagaaggattcacagaaactgctgtgtgatgtgtgcatccaaatcacggagttgaacttttcttttgttagagcagttttgaaaccccgtttccgtggaatctgccagtggacatttggagcgcattgagggctatggtggagaaagaaatatcttcacataaaaactagaaagaagcattctcagaaacacctatttgaagtgtgcattcaactcacagagttgaaccttacttttgacagaacagttttgaaactcacttttgtacaattgcaggtgaatatttggagcgccttgaagcctttgttggaagtgggaatatcttcacatacaaactagccagaagcactctcagaaacttctttgtgatgtgtgcattgaacccagagagatgaaccgttcctttgagagagcagttttgaaacgtgtttttgtaagatctgcaagtggatatttggggcgctttgagcccttaggtggaaacgggaatatcttcgaataaaaactagacagaattattctcagaatcttctttgtgatgtgggcattcaactaacacagttgaacatttcttttgacagagcagttctgaaacactctttttgtagaatccgccagtggatatttggagcgctttgagggctattgtgcaaacggaaatatcttcacctaaaaactagaccgaagcaatcccagaaactactttgtgatgtttgcattaaactcatagagttgaacctacctcttcatagagcagtttggaaaacctctttttgtagaatctgcaagtggatatttggaccactttgaggccttcataggaaacagtactatcttcacataaaaactaggtagaagcattgtcagaaagttctttgtgatgtgtgaattcaactcacagagttgaaccttcctttaatagagcagttttgaaacactctttttgtagaatctgcaagtagatatttggagcgctttgaggccttcgttggaaaccggaatatcttcacataaaaagtagatagaggcattctcagaaacttttttgtgatatgtagattcaactcacagcgctgaacctttcttttgatagagcagttttgaaaaactcttttatcgaatctgcaagtagacatttggagtgctttgagggctgtggtcgaaaaggaaatatcttcacatagaatctagactgaagcattctcagcaacttctttgtgacgtttgcattcatctcacagtgttgaacataccttttcatagagcagttttgaaacactctttttgtagaatctgcaattggatatttggactgcgttgaggccttcactggaaacgggaatatcttcacataaacactagacagaagcattctctgaaacttctttgtgatgtgtgtattcaactcacagagttgaaccatcttttttatggagcggttttgaaacagtgtttttgtagaatcagcaagtggatattgggagcgctttgaggcctctggtggaaagggaatgtcttcacataaaaactggacagaagcattctcagaaacatctttgtgatgtttgcattcaactcacagagttgatccttccttttaatagggcagttttgcaacactctttttgtagaatgcaccagtgggcttttggagcacgtcaagggctatggtgaaaaaggaaatatcttcacataaaaactagacagaagtattctctaaaactcctttgtgatgtttgcattcaactcagaaagttgaacttctctttatatagtccagttttcaaacactatttttgtagaatctgcaagtggatactgggactgctttgaggccttcgttggaaacaggattatcttctcataaaaactagactgaaggattcttagaaacttctttgtgatgtgtgcattcaactcaccgagtggaacctcacttttgatagagcagtgttgaaagacacttgttgtagaatctgcaggtggatatttggagtgctttgaagccttccttggaaacgggaatatcttcacataaaaactagacataagcattctcagaaactcctttgtgatctgtccattcagctcacagagttgaaccttccttttgatagagcagttttgaaacactctttctgtagagtctgcaagtggatatcaggagcgctttgaggcctaggcagaaaaagaaatatctgtatataaaaactagacagaagcattctgagaaacttctttgtgatgtttgcattcaactaccagagttgaaccttccttttgatagagcagttttgaaacactctttgtgtagaatctgcatgtggatatctggagcgatttgaggcctatggtcaaaaaggaaatatcttcctatgaaaaactgacaaaagcattctcagaaactactttgagatatgtgcattcaactcacagagttgaaacttttttttgatagagcagttttgaaacactctgtagaatctgaaagtggatatttggagctatttgagggctatggtggaaaagaaaatatattcccattaaactagacagaagcatcctcagaaacttctttatgatgtttgcattaaactcacagagttgaacatacctttccatagagcagttttgaaacactctttttggggaatccgcaagtggatatttggactgctttgagacctttgctggaaatgggaatatcttcacatataaactagacagaagcattctcaagaaacttcttcgtgatgtgtgcattctactcccaaagttgaaccttccttttcataaagcatttttgaaacactccttttgtacaatctacaattggatatttggaacgctttgatgcccgtggtagaaaaggaaatctcctcatataaaaactagacagaaggattcacagaaactgctgtgtgatgtgtgcatccaaatcacggagttgaacttttcttttgttagagcagttttgaaaccctgtttccgtggaatctgccagtgggcatttggagcgcattgagggctatggtggagaaggaaatatcttcacataaaaactagaaagaagcattctcagaaacatctatgtgaagtgtgcattcaactcacagagttgaaccttccttttgatagaagagttttgaaacactcttttgtacaattgcaggtgaatatttggagcgctttgaagcctttgttggaaatgggaatatcctcacataaaaactagccagaatcattctcagaaacttctttgtgatgtgtgcattgaacccagagagatgaaccgttcctttgagagagcagttttgaaacgtgtttttgtaagatctgcaagtggatatttggggcgctttgagtccttaggtggaaacgggaatatcttcgaataaaatctagacagaattattctcagaatcttctttgtgatgtgggcattcaactaacacagttgaacatttcttttgacagagcagttctgaaacactctttttgtagaatccgccagtggatatttggagcgcttggagggctattgtgcaaatggaaatatcttcacctaaaaactagaccgaagcaatcccagaaactactttgtgatgtttgcattcaactcacagagttgaacctacctcttcatagagcagtttggaaaacctctttttgtagaatctgcaagtggatatttggaccactttgaggccttcataggaaacagtactatcttaacataaaaactaggtagaagcattgtcagaaagttctttgtgatgtgtgaattcaactcacagagttgaaccttcctttaatagagcagttttgaaacactctttttgtagaatctgccagtagatatttggagcgttttgaggccttcattggaaaccggaatatcttcacataaaaagtagatagaggcattctcagaaacttttttgtgatatgtagattcaactcacagcgctgaacttttcttttgatagagcagttttgaaaaactcttttatcgaatctgcaagtagacatttggagtgctttgagggctgtggtcgaaaaggaaatatcttcacatagaaactagactgaagcattctcagcaacttctttgtgacgtttgcattcatctcacagtgttgaacataccttttcatagagcagttttgaaacactatttttgtagtatctgcaagtggatatttggactgctttgaggccttcattggaaacgggaatatcttcacataaacactagacagaagcattctctgaaacttctttgtgatgtgtgtattcaactcacagagtggaaccatcttttttatggagcggttttgaaacagtgttttggtagaatcagcaattggatatttggagcgctttgaggcctctggtggaaagggaatgtcttcacataaaaactggacagaagcattctcagaaacatctttgtgatgtttgcattcaactcacagagttgatccttccttttaatagggcagttttgcaacattctttttgtagaatgcaccagtgggcttttggagcacgtcaagggctatggtgaaaaaggaaatatcttcacaaaaaaccagacagaagtattctgtaaaactcctttgtgatgtttgcattcaactcagaaagttgaacttctctttatatagtccagttttcaaacactatttttgtagaatctgcaagtggatactgggactgctttgaggctatcgttggaaacaggattatcttcacataaaaactagactgaaggattcttagaaacttctttgtgatgtgtgcattcaactcaccgagtggaacctcacttttgatagagcagtgttgaaagacacttgttgtagaatctgcaggtggatatttggagtgctttgaagccttccttggaaacgggaatatcttcacataaaaactagacataagcatgctcagaaactcctttgtgatctgtccattcagctcacagagttgaaccttccttttgatagagcagttttgaaacactctttctgtagagtgtgcaagtggatatcaggagcgctttgaggcctatggcagaaaaagaaatatctggctctaaaaactagacagaagcattctgagaaacttctttgtgatgtttgcattcaactaccagagttgaaccttccttttgatagagcagttttgaaacactctttgtgtagaatctgcatgtggatatcaggagcgctttgaggcctatggcagaaaaagaaatatctggctctaaaatctagacagaagcattctcagaaactactttgtgttatgtgcattccactcacagagttgaaacttttttttgatagagcagttttgaaacactttgtagaatctgaaagtggatatttggagctctttgagggctatggtagaaaagaaaatatattcacattaaactagacagaagcattctcagaaacttctttatgatgtttgcattaaactcacagagttgaacatacctttccatagagcagttttgaaacactctttttgtggaatccgcaagtgaatatttggaccgctttgagaccttcgctggaaatgggaatattttcacatataaactggacagaagcattctcggaaacttcttcgtgatgtgtgcattctgctcccaaagttgaaccttccttttcataaagcagttttgaaacactcttttgtacaatctaccattggatatgtggaaggctttgatgcccatggtagaaaaggaaacatcctcatataaaatctagacagannnnnnnnnnnnnnnnnnnnnnnnnnnnnnnnnnnnnnnnnnnnnnnnnnnnnnnnnnnnnnnnnnnnnnnnnnnnnnnnnnnnnnnnnnnnnnnnnnnnagcactctcagaaacttctttaggatgtttacagtaaactcacagagttgaacatacctttccgtagagcagttttgaaacactctgtttgtgggatccgcaagtggatatttggaccgctttgagacctttgctggaaatgggaatatcttcacatataaactagacagaagcattctcagaaacttcttggtgatgggtgcattgtactccctaatttgaatcttccttctcatggagcagttttgaaacactctgtttgtgcaatctacaattggagaattggaacgcttggatgcccgtggtagaaaaggaaatatcctcatataaaaactagacagaaggattcacagaaaatgcttggggatgtgtgcattcaaatcacggagttgaatctttcttttgttagagcagttttgaaacactgtttctgtggaatctgccagcggacacttggagcgctttgagggctatggtggagaaggaaatatcttcacataaaaactagaaagaagcattctcagaaacatttatgtgaagcgtgcattcaactcacagagttgaaccttccttttgatagaacagttttgaaacactcttttgaacaattgcaggtgaatctttgagcgctttgaagcctttgttggaaatgggaatatcttcacacacaaactagccagaagcattctcagaaacttctttgtgatgtgtgcgttgaacccagagagatgaacctttccttcgatagagcagttttgaaacgcgtttttgtaagatcggcaagcggataattggcttcgctttttgtcctttggtggaaacgggaatatcttctaataaaaactagacagaaatattctcagaatcttctttgtgatgtgggcattcaactaacacagttgaacctttcttttcacagagcagttttgaaacacccttttggtagaatctgccagtggatatttggagcgctttgagggctattgtgccaatggaaatatctgcccctaaaaactagacagaaagcattctcagaaactgctttgtgatgtttgcattcaactcacagagttgaacctaccttttcatagagcagttttgaaaacctctttttgtagaatctgcaagaggatattcggaccactttgaggccttcataggaaacagtaatatcttcacataaaaactagatagaagcattgtcaggaagttctttgtgatgtgtgaattcaactcacagagttgaaccttcctttaatagagcagtgttgaaacactctttttctagaatctgcaagtagatatttggagcgcttggaggccttcgttggaaaccggaatatcttcacaggaaatgtagatagagtcattctcagaaacttttttgtgatatgtagattcaactcacagcgttgaacctttcttttgatagagcagttttgaaaaactcttttatcgagtctgcaagtagacatttggagtgctttgagggctgtggtcgaaaaggaaatatcttcacatagaaactagactgaagcattctcagcaacttctttgtgacgtttgcattcatctcacagtgttgaacatacctttccgtagagtagttttgaaacactgtttttgtagaatcggcaagtggatatttggactgctttgaggccttcatcggaaacgggaatatcttcacataaacactagagagaagcattctgagaaacttctttgtgatctatccattcaactcacagagttgaaccttcctttttatggagcagttttgaatcactgtttttggagtatctgcaagtggatatttggagcgctttgaggcctatggtagaaaaagaaatatctgcctctaaaaaccagacagaagcattccgagaaacttctctgtgatgtttgcattcaactagcagagttgaaccttcctcttgatagggcagtttggaaacactctttttgtagaatctgcatgtggatatctggagtggtttgaggcctacggtcaaaaatgtaatctcttcctgggaaaaatagacgaaagcattctcagaaactgctttgtgatatgtgcattcgactcaccgagttgaaacttttttttgatagagcagttttgaaacactctgtagaatctgaaagtgtatatttggaactatttgagggctatggcgaaaaagaaaatatattcacattaaactagacagcagcattcccagaaacttctttaggatgttttcagtaaactcacagagttgaacatacctttccgtagagcagttttgaaacactctgtttgtgggatccgcaagtggatatttggacccctttgagacctttgctggaaacgggaatatcttcacatataaactagacagaagcattctcagaaacttcttcgtgatgtgtgcattctactcccgaatttgaatcttccttttcatgaagcagttttgaaacacactgtttgtgcaatccacaattggataattggaacgctttgatgcccatggtagaaaaggaaatatcctcatataaaaactagacagaaggattcacagaaaatgctttgtgatgtgtgcattcaaatcacggagttgaatctttcttttgtcagagcagttttgaaacactgtttctgtggaatctgccagcggacacttgcagcgctttgagggctatggtggagaaggaaatatcttcccataaaaactagaaagaagcattctcagaaacatttatgtgaagcgtgcattcaactcacagagttgaaccttccttttgatacaacagttttgaaacactcttttgaacaattgcaggtgaatctttggagcgctttgaagcctttgttggaaatgggaatatcttcacacataaactagccagaagtattctcagaaacttctttgtgatgtgtgcgttgaacccagagagatgaacctttcctttgatagagcagttttgaaacgtgtttttgtaagatctgcaagcggataattggcttcgctttgtgtcctttggtggaaacgggaatatcttctaataaaaactagacagaaaaatattctcacaatcgtctttgtgatgtgggcattcaactaacacagttgaacatttcttctcacagagcagttttgaaacactcttttgctagaatctgccagtggatacttggagggctttgagggctattgtgccaatggagatatcttcccctaaaaactagacagaagcattctcagaaactacttcgtgatgtttgcattcaacacacagagttgaacatacctcttcacagagcagttttgaaaacctctttctgtagaatctgcaagtggatattcggaccactttgaggccttcacaggaaacagtaatatcttcacataaaaactagatagaaacattgtcagaatgttctttgtgatgtgtgaattcaactcacagagttgaaccttcctttaatagagcagttttgaaacactctttttctagaatctgccagtagatatttggagcgctttgaggccttcgttggaaaccggaatatctccacataaaaagtagatagaggcattctcagaaacttttctgtgaaatgtagattcaactcacagcgttgaacctttctttggatggagcagttttgaaaaacccttttatcgaatctgcaggtagacattcggggtgctttgagggctgtggtgcaaaaggaaatgtcttcccatagaaactagactgaagcattctcagcaacttcttggtaacgtttgcattcatctcacagtgttgaacatacctttccatagagtggttttgaaacactgtttttgtagaatcggcaagtggatatttggactgctttgaggccttcatcggaaacgggaatatcttcacataaacactagagagaagcattcccagaaacttctttaggatatttgcagtaaactcacagagttgaacatacctttttatggagcagttttgaaacactgtttttggagaatctgcaagtggatatttggagcgctttgaggcctatggtagaaaaagaaatatctgcctatgacaacaagacagaagcattctgagaaacttctttgtgatgtttgcattcaactaccagagttgaatcttccttttgatagggcagtttggaaacactctttttgtagaatctgcatgtggatatctggagcgatttgaggcctatggtcaaaatggaaatatcttcctgggaaaaatagacgaaagcattctcagaaactgctttgtgatatgtgcattcgactcaccgagttgaaactttttttggatagagcagttttgaaacactctgtagaatctgaaagtggatgtttggagctctttgagggctatggcggaaaagaaaatatattcacattaaactagacagcagcattctcagaaacttctttaggatgtctgcagtaaactcacagagttgaacatacctttctgtagagcagttttgaaacactctgtttgtgggatccgcaagtggatatttggacagctttgagatctttgctggaaatgggaatatcttcacatataaactagacagaagcattctcagaaacttcttcgtgatgtgtgcattctactcccgaatttgaatcttccttttcatgaagcagttttgaaacactctgtttgtgcaatccacagttggataattggaacgctttgatgcccatggtagaaaaggaaatatcctcatataaaaactagacagaagcattcacagaaaatgctttgtgatgtgtgcattcaaatcacggagttgaatgtttcttttgttagagcagttttgaatcactgtttctgtggaatctgccagcggacacttggagcgctttgagggctatggtggagaaggaaatatcttcacataaaaactagaaagaagcattctaggaaacatttatgtgaagcgtgcattcaactcacagagttgaaccttccttttgatagaacagttttgaaacactcttttgaacaattgcaggtgaatctttggagcgctttgaagcctttgttggaaatgggaatatcttcacacacaaactagccagaagtattctcagaaacttctttgtgatgtgtgcgttgaacccagagagatgaacctttcctttgatagagctgttttgaaacgtgtttttgtaagatctgcaagcggataattggcttcgctttgtgtcctttggtggaaacgggaatatcttctaataaaaactagacagagatattctcagaaacttctttgtgatgtgggcattcaactaacgcagttgaacatttcttttcacagagcagttttgaaacactcttttggtcgaatctgccagtggatatttggagcgctttgagggctattgtgccaatggaaatatctgcccctaaaaactagacagaagcattctcagaaactacttcgtgatgtctgcattcaacacacagagttgaacatacctcttcacagagcagttttgaaaacctctttctgtagaatctgcaagtggatattcgggccactttgaggccttcataggaaacagtaatatcttcacataaaaactagatagaagcattgtcagaaagttctttgtgatgtgtgaattcaactcacagagttgaaccttcctttaatagagcagttttgaaacactcttcttctagaatctgcaagtagatatttggagcgctttgaggccttcgttggaaaccggaatatcttcacataaaaagtagatagaggcattctcagaaacttttttttgatatgtagattcaactcacagcgttgaacctttctttggatggagcagttttgaaaaactcttttttcgaatctgcaggtagacatttggggtgctttgagggctgtggtgcaaaaggaaatgtcttcccatagaaactagactgaagcattctcagcaacttctttgtgacgtttgcattcatctcacagtgttgaacatacctttccatagagtagttttgaaacactatttttgtagaatctgcaagtggatatttggactgctttgaggccttcatcggaaacggcaatatcttcacataaacactagacagaagcattctcagaaacttctttgtgatctgtccattcaactcacagagttgaaacttcctttttatggagcagttttgaaacactgtttttggagaatctgcaagtggatatttggagagatttgaggcctatggtagaaaaaggaatatctacctctaaaaactagacagaagcattccgagaaacttctctgtgatgtttgcattcaactagcagagttgaaccttccttttgatagggcagtttggaaacactctttttgtagaatctgcatgtggatatctggagcggtttgaggcctacggtcaaaaaggcaataagttcctgggaaaaatagacgaaagcattctcagaaactgctttgtgatatgtgcattcgaatcaccgagttgaaacttttttttcatagagcagttttgaaacactctgtagattctgaaagtggctatttggaggtctttgagggctatggcggaaaagaaaatatattcacattaaactagacagcagcattctcagaaacttctttaggatgtttgcagtaaactcacagagttgaacatacctttccgtagagcagttttgaaacactctgtttgtgggatccgcaagtggatatttggaccgctttgagaacttggctggaaatggcaatatcttcacgtataaactagacagaagcattctcagaaacttcttcgtgatgtgtgcattctactcccaaatttgaatcttccttttcatgaagcagttttgaaacactctatttgtgcattctacaattggatgattggaacgctttgatgtccatggtagaaaaggaaatatcctcatataaaaactagacagaaggattcacagaaaatgctttgtgatgtgtgcattccattcacggagttgaatctttcttttgttagagcagttttgaaacactgtttctgtggaatctgccagcggacacttggagcgctttgagggctatggtggagaaggaaatatcttcccataaaaactagagagaagcattctcagaaccatttatgtgaagcgtgcattcaactcacagagttgaaccttccttttgatagaacagttttgaaacactcttttgaacaattgcaggtgaatatttggagggctttgaagcctttgttggaaatgggtatatcttcacacacaaactagccagaagcattctcagaaacttctttgtgatgtgtgcgttgaacccagagagacgaacctttcctttgatagagcagttttggaatgtgtttttgtaagatctgcaagcggataattggcttcgctttgtgtcctttggtggaaacgggaatatcttctaataaaaactagacagaaatattctcacaatcgtctttgtgatgtgggcattcaactaacacagttgaacatttcttctcacagagcagttttgaaacactcttttgctaggatctgccagtggatacttggagcgctttgagggctattgtgccaatggagatatcttcccctaaaaactagacagaagcattctcagaaactactttgtgatgtttgcattcaactcacagagttgaacatacctcttcatagagcagttttgaaaacctctttttgtagaatctgcaagtggatattcggaccactttgaggccttcataggaaacagtaataccttcacataaaaattagatagaagcattgtcagaaagttctttgtcatgtgtgaattcaactcacagagttgaaccttcctttaatagaccagttttgaaacactctttttctagaatctgcaagtagatatttggagtgctttgaggccttcgttggaaaccggaatatcttcacataaaacgtagatagaggcattctcagaaacttttttgtgatatgtagattcaactaacagcgttgaacttttcttttgatacagcggttttgaaaaactcttatatcgaatctgcaaatagatatttggagtgctttgagagctgtggtgcaaaaggaaatgtcttcccatagaaactagactgaagcattctcagcagcttctttgtgacgtttgcattcatctcacagtgttgaacatacctttccatagagtagttttgaagcactatttttgtagaatctgcaagtggatatttggactgctttcaggccttcatcggaaacgggaatatcttcacataaacactagacagaagcattctcagaaacttctttgtcatctgtccattcaactcacagagttgaaccttcctttttatggagcagttttgaaacactccttttggagaatctgcaagaggatatttggagcgctttgaggcctatggtagaaaaagaaatatctgcctctaaaaaccagacagaagcattctgagaaacttctttgtgatgtttgcattcaactaccagagttgaaccttccttttgatagggcagtttggaaacactctttttgtagaatctgcatgtggatatctggagcgatttgaggcctacggtccaaaaggaaatatcttcctgggaaaaatagatgaaagcattctcagaaactgctttgtgatatgtgcattcgactcaccgagttgaaactttttttggatagagcagttttgaaacactctgtagaatctgaaagtggatatttggaactctttgagggctatggcggaaaagaaaatatattcacattaaactagacagcagcattcccagaaacttctttaggatgtttgcagtaaactcacagatttgaacatacctttccgtagagcagttttgaaacactctgtttgtgggatccgcaagtggatatttggaccgctttgagacctttgctggaaacgggaatatcttcacatgtaaactggacagaagcattttcagaaacttcttcgtgatgtgtgcattctattcccaaatttgaatcttccttttcatgaagcagttttgaaacactctgtttgtgcaatccacaattggataattggaaagctttgatgcccatggtagaaaaggaaatatcctcatataaaaactagacagaaggattcacagaaaatgctttgtgatgtgtgcattcaaatcacggagttgaatctttcttttgtcagagcagttttgaaacactgttactgtggaatcttccagcggacacttggagcgctttgagggctatggtggagaaggaaatatcttcacataaaaactagaaagaagcattctcagaaccatttatgtgaagcgtgcattcaactcacagagttgaaccttccttttgatagaacagttttgaaacactcttttgaacaattgcaggtgaatatttggagggctttgaagcctttgttggaaatgggaatatcttcacacacgaactagccagaagcattctcagaaacttctttgtgatgtgtgcgttgaacccagagagatgaacttttcctttgatagagcagttttgaaacgtgtttttgtaagatcggcaagtggataattggcttcgctttgtgtcctttggtggaaacgggaatatcttctaataaaaactagacagaaatattctcagaatctcctttgtgatgtgggcattcaactaacacagttgaacatttcttttcacagagcagtttggaacactcttttggtagaatctgccagtggatatttggagcgcttggagggctattgtgccaatggaaatatctgcccctgaaaactagacagaagcattctcagaaactacttcgtgatgtttgcattcaacacacagagttgaacatacctcttcacagagcagttttgaaaacctctttctgtagaatatgcaagtggatattcggaccactttgaggccttcattggaaacagtaatatcttcacataaaaactagatagaaacattgtcagaaagttctttgtgatgtgtgaattcaactcacagagttgaatcttcctttaatagagcagttttgaaacactctttttctagaatctgccagtagatatttggagcgctttgaggccttcgttggaaaccggaatatcttcacataaaaagtagatagaggcatctcagaaacttttttgtgatatgtagattcaactcacagcgttgaacctttctttggatggagcagttttgaaaaactcttttatcgaatctgcaggtagacatttggggtgctttgagggctgtggtgcaaaaggaaatgtcttcccatagaaactagactgaagcattctcagcaacttctttgtgacgtttgcattgatctcacagtgttgaacatacctttgcatagagtagttttgaaacactatttttgtagaatctgcaagtggatatttggactgctttgaggcctccatcggaaacgggaatatcttcacataaacactggacagaagcattctcagaaacttctttgtgatctgtccattcaactcacagagttgaaccttcctttttatggagcagttttgaaacactgttcttggagaatctgcaagtggatatttggagcgctttgaggcctgtggtagaaaaagaaatatctgcctctaaaaactagacagaagcattctgagaaacttctttgtgatgtttgccttcaactaccagagttgaaccttccttttgatagggcagtttggaaacactctttttgtagaatctgcatgtggatatctggagcgaattgaggcctaccgtccaaaaggaaatatcttcctgggaaaaatagacgaaagcattctcagaaagtgctttgtgatatgtgcattcgactcaccgagttgaaacctttttttgatagagcagttttgaaacactctgtagaatctgaaagtggatatttggagctctttgagggctatggcggaaatgaaaatatattcacattaaagtagacagcagcattcccagtaaacttctttaggatgtttgcagtaaactcacagagttgaacatacctttccgtagagcagctttgaaacactctgtgtgtgggatccgcaagtggatatttggaccgctttgagacctttgctggaaacgggaatatcttcacatataaactggacagaagcattctcagaaacttcttcgtgatgtgtgcattctcctcccgaatttgaatcttccttttcatgaagcagttttgaaacactctgtttgtgcaatccacaattggataatgggaacgctttgatgcccatggtagaaaaggaaatatcctcatataaaaactagacagaaggattcacagaaaatgctttgtgatgtgtacattcaaatcacagagttgaatctttcttttgtcagagcagttttgaaacactgtttctgtggaatctgccagcggacacttggagcgctttgagggctatggtggagaaggaaatatcttcccataaaaactagagagaagcattctgagaaccatttatgtgaagcgtgcgttcctctcacagagttgaaccttccttttgatagaacagttttgaaacactcttttgaacaattgcaggtgaatatttggagggctttgaagcctttgttggaaatgggaatatcttcacacacaaactagccagaagcattctcaagaaacttctttgtgatgtgtgcgttgaacccagagagatgaacctttccttggatagagcagttttgaaacgtgtttttgtaagatctgcaagtggataattggcttcgctttgtgtcctttggtggaaacgggaatatcttctaataaaaactagacagaaatattctcagaatcttctttgtgatgagggcattcaactaacacatttgaacatttcttttcacagagcagttttgaaacactcttttggtggaatctgccagaggatatctggagcgctttgagggctattgtgccaatggaaatatcttcccctaaaaactagacagaaacattctcagaaactactttgtgatgtttgcattcaactcacagagttgaacatacctcttcatagagcagttttgaaaacctctttttgtagaatctgcaagtggatattcggaccactttgaggccttcataggaaacagtaatatcttcacataaaaactagatagaagcattgtcaggaagttctttgtgatgtgtgaattcaactcacagagttgaaccttcctttaatagagcagttttgaaacactctttttctagaatctgcaagtagatatttggagcgcttggaggccttctttggaaaccataatatcttcacaggaaatgtagatagaggcattctcagaaacttatttgtgatatgtagattcaactcacagcgttgaacctttctttggatggagcagttttgaaaaactcttttatcgaatctgcaggtagacattcggggtgctttgagggctgtggtgcaaaaggaaatgtcttcccatagaaactagactgaagcattctcagaaacttcttggtgacgtttgcattcatctcacagtgttgaacatacctttccatagagtagttttgaaacactgtttttgtagaatcggcaagtggatatttggactgcattgaggccttcatcggaaacgggaatatcttcacataaacactagagagaagcattctcagaaacttctttgtgatctgtccattcaactcacagagttgaaccttcctttttatggagcagttttgaaacactgtttttggagaatctgcaagtggatatttggagcgcttttaggcctatggtagaaaaagaaatatctgcctattacaactagactgaagcattccgagaaacttctttgtgatgtttgcattcaactagcagagttgaaccttccttttgatagggcagcttggaaacactctttttgtagaacccgcatgtggatatctggagcggtttgaggcctacggtcaaaaaggaaatatcttcctgggaaaaatagacgaaagcattctcagaaactgctttgtgatatgtgcattcgactcaccgagttgaaacatttttttgatagagcagttttgaaacactctgtagaatctgaaagtggatatttggagctctttgagggctatggcggaaaagaaaatatattcacattaaactagacagcaacattctcagaaacttccttaggatgtttgcagtaaactcacagagttgaacatacctttccgtagagcagttttgaaacactctgtttgtgggatccgcaagtggatatttggaccgctttgagacctttgctggaaatgggaatatcttcacatataaactagacagaagcattctcagaaacttcctcgtgatgtgtgcattctactcccgaatttgaatcttccttttcctgaagcagttttgaaacactctgtttgtgcgatccacaattggataattggaacgctttgatgcccatggtagaaaaggaaatatcctcatatgaaaactagacagaaggattcacagaaaatgctttgtgatgtgtgcattcaaatcacggagttgaatctttcttttctcagagcagttttgaaacactgtttctgtggaatctgccagcggacacttggagcgctttgagggctatggtggagaaggaaatatcttcccataaaaactagaaagaagcattctcagaaacatttatgtgaagcgtgcattcaactcacagagttgaaccttccttttgatacaacagttttgaaacacccttttgaacaattgcaggtgaatctttggagcgctttgaagcctttgttggaaatgggaatatcttcacacacaaactagccagaagcattctcagaaacttctttgtgatgtgtgcgttgaacccagagagatgaacctttcctttgatagagctgttttgaaacgtgtttttgtaaggtctgcaagcggataatgggcttcgctttgtgtcctttggtggaaacgggaatatcttctaataaaaactagacagaaatattctcacaatcgtctttgtgatgtgggcattcaactaacacagttgaacatttcttctcacagagcagttttgaaacactcttttgctagaatctgccagtggatacttggagcgctttgagggctattgtgccaatggagatatcttcccctaaaaactagacagaagcattctcagaaactactttgtgatgtttgcattcaactcacagagttgaacatacctcttcatagagcagttttgaaaacctctttttgtagaatctgcaagtggatattcggaccactttgaggccttcataggaaacagtaataccttcacatgaaaactagatagaagcattgtcagaaagttcgttgtgatgtgtgaatttaactcacagagttgaagcttcctttaatagagcagttttgaaacactctttttctagaatctgcaagtagatatttggagcgctttgaggccttcgttggaaaccggaatatcttcacataaaaagtagatagaggcattctcagaaacttttttgtgatatgtagattcaactcacagcgttgaacctttctttggatggagcagttttgaaaaactcttctatcgaatctgcaggtagacatttggggtgctttgagggctgtggtgcaaaaggaaatgtcttcccatagaaactagacagaagcattctcagcaacttctttgtgacgtttgcattcatctcacagtgttgaacttacctttccatagagtagttttgaagcactatttttgtagaatctgcaagtggatatttggactgctttgaggccttcatcggaaacgggaatatcttcacataaacactagacagaagcattctcagaaacttctttgtcatctgtccattcaactcacagagttgaaccttcctttttatggagcagttttgaaacactgttcttggagaatctgcaagtggatatttggagcgcttagaggcctgtggtagaaaaagaaatatctgcctctaaaaactagacagaagcattctgagaaacttctttgtgatgtttgcattcaactagcagagttgaaccttccttttgatagggcagtttggaaacactcttttgtagaatctgcatgtggatatctggagcgatttgaggcctacggtcaaaaaggaaatatcttcctgggaaaaatagacgaaagcattctcagaaactgctttgtgatatgtgcattcgactcaccgagttgaaactttttttggatagagcagttttgaaacactctgtagaatctgaaagtggatatttggagctctttgagggctatggtggaaaagaaaatatattcacattaaactatacagcagcattctcagaaacatctttaggatgtttgcagtaaactcatagagttcaacatacctttccgtagagcagctttgaaacactctgtttgtgggatccgcaagtggatatttggaccgctttgagacctttgctggaaatgggaatatcttcacatataaactagacaggaagcattctcagaaacttcttcgtgatgtgtgcattctactcccgaatttgaatcttccttttcatgaagcagttttgaaacactctgtttgtgcaatccacaattggataattggaacgctttgatgcccatggtagaaaaggaaatagcctcatataaaaactagacagaaggattcacagaaaatgctttgtgatgtgtgcattcaaatcacggtgttgaatctttcttttgttagagcagttttgaaacactgtttctgtggaatctgccagcggacacttggagcgctttgagggctacggtggagaaggaaatatcttcacataaaaactagaaagaagcattctcagaaacatttatgtgaagcgtgcattcaactcacagagttgaaccttccttttgatagaacagttttgaaacactcttttgaacattgcaggtgaatctttggagcgctttgaagcctttgttggaaatgggaatatcttcacacacaaactagccagaagcattctcagaaacttctttgtgatgtgtgcgttgaacccagagagatgaacctttccttcgatagagcagttttgaaacgcgtttttgtaagatcggcaagcggataattggcttcgctttgtgtcctttggtggaaacgggaatatcttctaataaaaactagacagaaatattctcagaatcttctttgtgatgtgggcattcaactaacacagttgaacgtttcttttcacagagcagttttgaaacactcttttggtagaatctgccagtggatatttggagcgctttgagggctcttgtgccaacggaaatatctgcccctaaaaactagacagaagcattctcagaaactactttgtgatgtttgcattcaactcacatagttgaacatacctcttcatagagcaggtttgaaaacttctttttgtattatctgcaagtggatatttggaccactttgaggccttcataggaaacagtaatatattctcataaaaactcgatagaagcattgtcagaaagttctttgtgatgtgtgaattcaactcacagagttgaaccttcctttcatagagcagttttgaaacactctttttctagaatctgcaagtagatatttggagcgctttgaggccttcgttggaaaccggactatcttcacgtaaaaagtagatagaggcattctcagaaactttttttgtgatatgtagattcaactcacagcgttgaacctttctttggatggagcagttttgaaaaactcttttatcgaatctgcaggtagacatttggggtgctttgagggctgtggtgcaaaaggaaatgtcttcccatagaaactagactgaagcattctcagcaacttcttggtgacgtttgcattcatctcacagtgttgaacatacctttccatagagtagttttgaaacactgtttgtgtagaataggcaagtggatatttggactgctttgaggccttcatcggaaacgggaatatcttcacataaacactagagagaagcattctcagaaacttctttgtgatctgtccgttcaactcacagagttgaaccttcctttttatggagcagttttgaaacactgcttgtggagaatctgcaagtggatatttggagcgccttgaggccaatggtagaaaaagaaatatctgcctctaaatactagactgaagcattccgagaaacttttttgtgatgtttgcattcaactagcagagttgaaccttccttttgtagggcagtttggaaatactcattttgtagaatctgcatgtggatatctggagcggtttgaggcctacggtcaaaaaggaaatatcttcctgggaaaaatagacgaaagcattctcagaaactgctttgtgatatgtgcattcgactcaccgagttgaaacttttttttgatagagcagttttgaaacactctgtagaatctgaaagtagatatttggagctctttgatggctatggcggaaattaaaatatattcacattaaagtagacagcagcattctcagaaacttctttaggatgtttgcagtaaactcacagagttaaacatatctttccgtagagcagttttgaaacactctgtttgtgggatccgcaagtggatatttgggcccctttgagacctttgctggaaatgggaatatcttcacatataaactagacagaagcattctcagaaacttcttcgtgatgtgtgcattctactcccaaatttgaatcttctttctcatgaagcagttttgaaacactctatttgtgcaatctacaattggataattggaaccctttgatgcccatggtagaaaaggaaatatcctcatataaaaactagacagaaggattcacagaaaatgctttgtgatgtgtgcattcaaatcacggagttgaatctttcttttgttagagcagttttgaaacactgtttctgtggaatctcccaggggacacttggagcgctttgagggctacggtggagaaggaaatatcttctcataaaaactagaaagaagcattctcagaaacatttatgtgaagcgtgcattcaactcacagagttgaaacttccttttgatagaacagttttgaaacactcttttgaacaattgcaggtgaatctttggagcgctttgaagcctttgttggaaatgggaatatcttcacacacaaactagccagaagcattctaagaaacttctttgtgatgtgtgcgatgaacccagagagatgaacctttcctttgatagagcagttttgaaaagtgtttttgtaagatctgcaagcggataattggcttccctttgtgtcctctggtggaaatgtgaatatcttctaataaaaactagacagaaatattctcagaatcttctttgtgatgtgggcattcaacaaacacagttgaacgtttcttttcacagagcagttttgaaacactcttttggtagaatctgccagtggatatttggagcgctttgagggctattgtgccaacggaaatatctgcccctaaaaagtagacagaagcattctcagaaactgctttgtgatgtttgcattcaactcacagagttgaacataccttttcatagagcagttttgaaaacctctttttgtagaatctgcaagtggatattcggaccagtttgaggccttcataggaaacagtaatatcttcacataaaaactagatagaagcattgtcagaaagttctttgtgatgtgtgaattcaactcagagagttgaaccttcctttaatagagcagttttgaaacactctttttctagaatctgccagtagatatttggagcgctttgaggccttcgttggaaaccggaatatcttcacataaaaagtagatagaggcattctcagaaactttttcgtgatatgtagattcaactcacagcgttgaacctttcttttgatagagcagttttgtaaaactcttttatcgaatctgcaagtagacatttgagtgctttgagggctgttgtgcaaaaggaaatgtcttcccatagaaactggactgaatcattctcagcaacttcttggtgacgtttgcattcatctcacagtgttgaacatacctttgcatagattagttttgaaacactgtttttgtagaatctgcaagtggacatttggactgctttgaggccttcattggaaacgggaatatcttcacataaacactagacagaagcattctcagaaacttctttgtcatctgtccattcaactcacagagttgaaccttcctttttatggagcagttttgaaacactccttttggagaatctgcaagtggatatttggagcgctttgaggcctagggtagaaacagaaatatctgcctctaaaaaccagacagaagcattcagagaaacttctttgtgatgtttgcattcaactaccagagttgaaccttccttttgatagggcagtttggaaacactctttttgtagaatctgcatgtggatatctggagcgatttgaggcctacggtcaaaaaggaaatatcttcctgggaaaaatagacgaaagcattctcagaaactgctttgtgatatgtgcattcgactcaccgagttgaaactttttttttgatagagcagttttgaaaaactctatagattctgaaagtgcatatttggagctctttgagggctatggcggaaaagaaaatatattcacattaaactagacagcagcattctcagaaacttctttaggatgtttgcagtaaactcacagagttgaacatacctttccgtagagcagttttgaaacactctgtttgtgggatccgcaagtggatatttggaccgctttgggacctttgctggaaatgggaatatcttcacgtataaactagacagaagcattctcagaaacttcctcgtgatgtgtgcattctactcccgaatttgaatcttccttttcatgaagcagttttgaaacactctgtttgtgcaatccacaattggataattggaacgctttgatgcccatggtagaaaacgaaatatcctcatataaaaactagacagaaggattcacagaaaatgctttgtgatgtgtgcattcaaatcacggagttgaatctttcttttgtcagagcagttttgaaacactgtttctgtggaatctgccagcggacacttggagcgctttgagggatatggtggagaaggaaatatcttcccataaaaactagaaagaagcattctcagaaacatttatgtgaagcgtgcattcaactcacagagttgaaccttccttgtgatacaacagttttgaaacactcttttgaacaattgcaggtgaatctttggagcgctttgaagcctttgttggaaatgggaatatcttcacacacaaactagccagaagcattctcagaaacttctttgtgatgcgtgcgtggaacccagagagatgaacctttcctttgatagagcagttttgaaacgtgtttttgtaagatctgcaagtggataatcggcttcgctttgtgtcctttggtggaaacgggaatatcttctaataaaaactagacagaaatattctcagaatcttctttgtgatgagggcattcaactaacacatttgaacatttcttttcacagagcagttttgaaacactcttttggtggaatctgccagtggatatctggagcgctttgagggctattgtgccaatggaaatatcttcccctaaaaactagacagaagcattctcagaaactacttcgtgatgtttgcattcaacacacagagttgaacatacctcttcacagaacagttttgaaaacctctttctgtagaatctgcaagtggatattcggaccactttgaggccttcacaggaaacagtaatatcttcacataaaaactagacagaagcattgtcagaaagttctttgtgatgtgtgaattcaactcacagagttgaaccttcctttaatagagcagttgtgaaacactctttttctagaatctgcaagtagatatttggagcgctttgaggccttcgttggaaaccggaatatcttcacaggaaaagtagatagaggcattctcagaaactttttcgtgatatgtggattcaactcacagcgttgaacctttcttttgatagagcagttttgtaaaactcttttatcgaatctgcatgtagacatttggagtgctttgggggctgtggtgcaaaaggaaatgtcttcccatagaaactagactaaagcattctcagcaacttctttgtgacgtttgcattcatctcacagtgttgaacatacctttccatagagtagttttgaaacactgtttttgtagaatcggcaagtggatatttggactgctttgaggccttcatcggaatcgggaatatcttcacataaacactagagagaagcattctcagaaacttctttgttatctgtccattcaactcacagagttgaaccttcctttttatggagcagttttgaaacactgtttgtggagaatctgcaagtggatatttggagcgtcttgaggccaatggtagaaaaagaaatatctgcctctaaatactagactgaagcattccgagaaacttctctgtgatgtttgcattcaactagcagagttgaaccttccttttgatagggcagtttggaaacactctttttgtagaatctgcatgtggatatactggagcggtttgaggcctacggtcaaaaaggaaatatcttcctgggaaaaatagacgaaagcattctcagaaactgctttgtgatatgtgcattcgactctccgagttgaaacttttttttgatagagcagttttgaaacactctgtagaatctgaaagtgtatatttggagctcttcgagggctatggcggaaaagaaaatatattcacattaaactagacagcagcattctcagaaacttctttaggatgtttgcagtaaactcacagagttgaacctatctttccgtagagcagttttgaaacactctgtttgtgggatccgcaaggggatatttggaccgctttgagacctttgctggaaatgggaatatcttcacatataaactagacagaagcattctcagaaacttcttcgtgatgtgtgcattctacccccaaatttgaatcttccttttcatgaagcagttttgaaacactctatttgtgcaatctacaatgggataattggaacgctttgatgcccatggtagaaaaggaaatatcctcatataaaaactagacagaaaggattcacagaaaatgctttgtgatgtgtgcattcaaatcacggagttgaatctttcttttgttagagcagttttgaaacactgtttctgtggaatctgccagcggacacttggagcgctttgagggctatggtggagaaggaaatatcttcacataaaaactagaaagaagcattctcagaaacatttatgtgaagtgtgcattcaactcacagagttgaaccttccttttgatagaacagttttgaaacactcttttgaacaattgcaggtgaatctttggagcgctttaaagcctttgttggaaatgggaatatcttcacacacaaactagccagaagcattctcagaaacttctttgtgatgtgtgcgttgaacccagagagatgaacctttcctttgatagagcagttttgaaacgtgtttttgtaagatctgcaagcggataattggcttcgctttgtgtcctttgttggaaaccggaatatcttctaataaaaactagacagaaatattctcagaatcttctttgtgatgtgggcattcaactaacacagttgaacatttcttttcacagagcagttttgaaacactcttttggtggaatctgccagtggatatttggagcgctttgagggctattgtgccaacggaaatatcttcccctaaaaactagacagaagcattctcagaaactacttcgtgatgtttgcattcaacacacagagttgaacatacctcttcacagagcagttttgaaaacctctttctgtagaatctgcaagtggatattcggaccactttgaggccttcataggaaacagtaatatctttgcctaaaaactagatagaaagcattgtcagaaagttctttgtgatgtgtgaattcaactcacagagttgaaccttcctttaatagagcagttttgaaacactctttttctagaatctgctagtagatatttggagtgcttggaggccttctttggaaaccggaatatcttcacaggaaatgtagatagaggcattctcagaaactttttcgtgatatgtggattcaactcacagcgttgaacctttcttttgatagagcagtgtggtaaaactcttttatcgaatctgcaagtagacatttggagtgctttgggggctgtggtgcaaaaggaaatgtcttcccatagaaactagactgaagcattctcagcaacttcttggtgacgtttgcattcatctcacagtgttgaacatacctttccatagagtggttttgaaacactgtttttgtagaatcggcaagtggatatttggactgctttgaggccttcatcggaaacgggaatatcttcacataaacactagacagaagcattctcagaaacttctttgtggtctgtccattcaactcacagagttgaaccttcctttttatggagcagttttgaaacactgtttttggagaatctgcaagtggatatttggagccctttgaggcctatggtagaaaaagaaatatctgcctatgagaacaagacagaagcattctgagaaacttctttgtgatgtttgcattcaactaccagagttgaaccttccttttgatagggcagtttggaaacactctttttgtagagtctggatgtggatatctggagcgatttgaggcctacggtccaaaaggaaatatcttcctgggaaaaatagacgaaagcattctcagaaagggctttgtgatatgcgcattcgactcaccgagttgaaacttttttttgatagagcagttttgaaacactctgtagaatctgaaagtggatatttggagctctttgagggctatggcggaaaagaaaatatattcacattaaaaaagtagacagcggcattctcagaaacttctttaggatgtttgcagtaaactcacagagtggaacctacctttccgtagagcagttttgaaacactctgtttgtgggatccgcaagtggatatttggaccgctttgagacctttgctggaaatgggaatatcttcacatataaactagacagaagcattctcagaaacttcttcgtgatgtgtgcattctactcgcaaatttgaatcttccttctcatgaagcagttttgaaactctctatttgtgcaatctacaattggataattggaaccctttgatgcccatggtagaaaaggaaatatcctcatataaaaactagacagaaggattcacagaaaatgctttgtgatgtgtgcattcaaatcacggagttgaatctttcttttgtcagagcagttttgaaacactgtttctgtggaatctgccagcggacacttggagcactttgagggctatggtggagaaggaaatatcttcccataaaaactagagagaagtattctcagaaacatttatgtgaagcgtgcattcaactcacagagttgaaccttacttttgatacaacagttttgaaacactcttttgaacaattgcaggtgaatctttggagcgctttgaagcctttgttggaaatgggaatatcttcacacacaaactagccagaagcattctcagaaacttctttgtgatgtgtgcgttgaacccagagagatgaacctttcctttgatagagcagttttgaaacgtgtttttgtaagatcggcaagcggataattggtttcgctttgtgtcctttggtggaaacgggaatatcttctaataaaaactagacagaaatattctcacaatctcctttgtgatgtgggcattcaactaacacagttgaacatttcttttcacagagcagttttgaaacactcttttggtagaatctggcagtggatatttggagcgctttgagggctgttgtgccaatggaaatatctgcccctaaaatctagacagaagcattctcagaaactacttcgtgatgtttgcattcaactcacagagttgaacatacctcttcacagagcagtattgaaaacctctttttgtagaatctgcaagtggatattcggagcactttgaggccttcataggaaccagtaatatcttcgcataaaaactagatagaagcattgtcagaaagttctttgtgatgtgtgaattcaactcacagagttgaaccttcctttaatagagcagttttgaaacactctttttctagaatctgcaagtagatatttggagcgcttggaggccttcgttggaaaccggaatatcttcacaggaaatgtagatagaggcattctcagatactttttcgtgatatgtggattcaactcacagcgttgaacctttcttttgatagagcagttttgtaaaactcttttatcgaatctgcaagtagacatttggagtgctttgggggctgtggtgcaaaaggaaatgtcttcccatagaaactagactgaagcattctcagcaacttctttgtgacgtttgcattcatctcacagtgttgaacatacctttccatagagaagttttgaaacactaattttgtagaatctgcaagtggatatttggactgctttgaggccttcattggaaacgggaatatcttcacataaacactagacagaagcattctcagaaacttctttgtgatctgtccattcaactcacagagttgaaccttcctttttatggagcagttttgaatcactgtttttggagaatctgcaagtggatatttggagcgctttgaggcctatggtagaaaatgaaatatctgcctctaaaaaccagacagaagcattctgagaaacttctttgtgatgtttgcattcaactaccagtagttgaaccttccttttgatagggcagtttggaaacactctttttgtagaatctgcatgtggatatctggagcgatttgaggcctacggtcaaaaaggaaatatcttcctgggaaaaatagacgaaagcattctcagaaactgctttgtgatatgtgcattcgactcagcgagttgaaacttttttttgatagagcagttttgaaacactctgtagaatctgaaagtggatatttggagctctttgagggctatggcggaaaagaaattatattcacatgaaactagacagcagcattcccagaagcttctttaggatgtttgctgtaaactcacagagttgaacatacctttccgtagagcagctttgaaacactctgtgtgtgggatccgcaagtggatatttggaccgctttgagacctttgctggaaacgggaatatcttcacatataaactggacagaagcattctcagaaacttcttcgtgatgtgtgcattgtactcccaaatttgaatcttccttctcatgcagcagttttgaaacactctgtttgtgcaatctacaattggagaattggaacgcttggatgcccgtggtagaaaaggaaatatcctcatataaaaactagacagaaggattcacagaaaatgctttgtgatgtgtgcattcaaatcacggagttgaatctttctttcgtcagagcagttttgaaacactgtttctgtggaatctgccagcggacacttggagcgctttgagggctatggtggagaaggaaatatcttcccataaaaactagaaagaagcattctcagaaacatttatgtgaagcgtgcattcaactcacagagttgaaccttccttttgatacaacagttttgaaacactcttttgaacaattgcaggtgaatccttggagcgctttgaagcctttgttggaaatgggaatatcttcacacacaaactagccagaagcattctcagaaacttctttgtgatgtgtgcgttgaacccagagagatgaacttttcctttgatagagcagttttgaaacgtgtttttgtaagatcggcaagtggataattggcttcgctttgtgtcctttgttggaaacgggaatatcttctaataaaaactagacagaaatattctcagaatctcctttttgatgtgggcattcaactaacacagttgaacatttcttttcacagagcagttttgaaacactcttttggtagaatctgccagtggatatttggagcgcttggagggctattgtgccaatggaaatatctgcccctgaaaactagacagaagcattctcagaaactactttgtgatgtttgcattcaactcacagagatgaacatacctctttatagagcagttttgaaatcctctttctgtagaatctgcaagtggatattcggaccactttgaggccttcatagaaaacagtaatatcttcacataaaaactagattcaagcattctcggaaacttctttgtgatgtgtgaattcacctcacagagttgaaccttcgataaatagagcagttttgaaacactctttttgtagaatctgcaatagatatttggagcgctttgaggccttcgttggaaaacggaatgtcttcacataaaaagtagatagaagcattctcagaaactactttgtgatctctccattcaactcacagatttgaaccttccttttgatagagcggttttgaaaaactcttatatcgaatctgcaagtagatatttggagtgctttgagggctgtggtgcaaaaggaaatgtcttcccatagaaactagactgaagcattctcagcaacttctttgtgacgtttgcattcatctcacagtgttgaacataccttttcatagagcagttttgaaacactatttttgtagtatctgcaagtggatatttggactgctttgaggccttcattggaaacgggaatatcttcacataaacactagacagaagcattctcagaaacttctttgtgatctgtccattcaactcacagagttggaccttcctttttatggagcagttttgaatcactgtttttggagaatctgcaagtggatatttggagcgctttgaggcctatggtagaaaaagaaatatctgcctctaaaaaccagacagaagcattctgagaaacttctttgtgatgtttacattcaactaccagagttgaaccttccttttgatagggcagttcggaaacactctttttgtagaatctgcatgtggatatctggagcgatttgaggcctacggtccagaaggaaatatcttcctgggaaaaatggacgaaagcattctcagaaactgctttgtgatatgtgcatttgactcaccgagttgaaacttttttttgatagagcagttttgaaacactctgtagaatctgaaagtggatatttggagctctttgagggctatggcggcaaagaaactatattcacattaaagtagacagcagcattctcagaaacttctttaggatgtttgcagtaaactcacagagttgaacatacctttccgtagagcagttttgaaacactctgtttgtgggatccgcacgtggatatttggaccgctttgagacctttgctggaaatgggagtatcttcacgtataaactagacagaagcattctcagaaacttcttcgtgatgtgtgcattgtactcccaaatttgaatcttccttcccaaggagcagttttgaaacactctgtttgtgcaatctacaattggagaattggaacgcttggatgcccgtggtagaaaaggaaatatcctcatataaaaactagacagaagtattcacagaaaatgctttgtgatgtgtgcattcaaatcacggagttgaatctttcttttgttagagcagttttgaaacactgtttctgtggaatctgccagcggacacttggagcgctttgagggctacggtggagacggaaatatcttcacataaaaactagaaagaagcattctcagaaacatttatgtgaagcgtgcattcaactcacagagttgaaccttcctttggatacaacagttttgaaacactcttttgaacaattgcaggtgaatctttggagcgctttgaagcctttgttggaaatgggaatatcttcacacacaaactagccagaagcattctcagaaacttctttgtgatgtgtgcgttgaacccagagagatgaacctttcctttgatagagcagtttggaaacgtgtttttgtaagatctgcaagcggataattggcttcgctttgtgtcctttggtggaaacgggaatatcttctaataaaaactagacagaaatattctcagaatcttctttgtgatgtgggcattcaactaacagagttgaacgtttcttttcacagagcagttttgaaacactcttttggtagaatctgccagtggatatttggtgcgctttgagggctattgtgccaacggaaatatctgtccctaaaaactagacagaagcattctcagaaactgttcgtgatgtttgcattcaactcacagacttgaacatacctcttcatagagcagttttgaaaacctctttttgtagaatctgcaagtggatattcggaccactttgaggccttcataggaaacagtaatatcttcacataaaaactagatagaagcattgtcagaaagttctttgtgatgtgtgaattcaactcacagagttgaaccttcctttaatagagcagttttgaaacactcttcttctagaatctgcacgtagatatttggagcgctttgaggccttcgttggaaaccggaatatcttcacagaaaaagtagatagaggcattctcagaaacattttttgtgatatgtagactcaactcacagcagttgaacctttctttggatggagcagttttaaaaaactcttttatcgaatctgcaggtagacatttggggtgctttgagggctgtggtgcaaaaggaaatgtcttcccatagaaactagactgaagcattctcagcaacttctttgtgacgtttgcattcatctcacagtgttgaacatacctttccatagggtagttttgaagcactatttttgtagaatctgcaagtggatatttggactgctttgaggccttcatcggaaacgggaatatcttcacataaacactagacagaagcattctcagaaatttctttgtggtctgtccattcaactcacagagttgaaccttcctttttatggagcagttttgaaacactgtttttggagaatctgcaagtggatatttggagcgctttgaggcctatggtagaaaaagaaatatctgcctatgacaacaagacagaagcattccgagaaacttctttgtgatgtttgcattcaactagcagagttgaaccttccttttgatagggcagtttggaaacactctttttgtagaatctgcatgtggatatctggagcggtttgaggcctacggtcaaaaaggtaatatcttcctgggaaaaatagacgaaagcattctcagaaactgctttgtgatatgggcattcgactcaccgagttgaaacttttttttgatagagcagttttgaaacactctgtagaatctgaaagtggatatttggagctctttgagggctatggcggaaaagaaaatatattcacattaaagtagacagcagcattctcagagacttctttaggatgtttgcagtaaactcacagagttgaacatacctttccgtaaagcagttttgaaaccttctgtttgtgggatctgcaagtggatatttggaccgctttgagacctttgctggaaatgggaatatcttcacatataaactagccagaagcattctcagaaacttcttcgtgatgtgtgcattctactcccaaagttgaaccttccttttcataaagcagttttgaaacactccttttgtacaatctacaattggataattggaacgctttgatgcccgtggaagaaaaggaaatctcctcatataaaaactagacagaaggattcacagaaaatgctttgtgatgtgtgcattcaaatcacggagttgaatctttcttttgtcagagcagttttgaaacactgtttctgtggaatctgccagcggacacttggagcactttgagggctatggtggagaaggaaatatcttcccataaaaactagaaagaagcattctcagaaccatttatgtgaagcgtgcattcaactcacagagttgaaccttccttttgatagaacagttttgaaacactcttttgaacaattgcaggtgaatctttggagcgctttgaagcctttgttggaaatgggaatatcttcacacacaaactagccagaagcattctcagaaacttctttgtgatgtgtgctttgaacccagagagatgaacctttcttttgatagagcagttttgaaacgtgtttttgtaagttcggcaagcggataattggcttcgctttgtttcctttggtggaaacgggaatatcttctaataaaaactagacagaaatattctcagaatctgctttgtgatgtgggcattcaactaacacagttgaacatttcttttcacagagcagttttgaaacactcttttggtagaatctgccagtggatatttggagcgcttggagggctattgtgccaatggaaatatctgcccctgaaaactagacagaagcattctcagaaactacttcgtgatgtttgcattcaactcaccgagttgaacatacctcttcatagagcagttttgaaaacctctttctgtagaatctgcaagtggatattcggaccactttgaggccttcataggaaacagtaatatcttcacataaaaactagatagaagcattgtcagaaagttctttgtgatgtgtgaattcaactcacagagttgaaccttcctttaatagagcagttgtgaaacactctttttctagaatctgcaagtagatatttggagcgcttggaggccttcgttggaaaccggaatatcttcacaggaaatgtagatagaggcattctcagatactttttcgtgatatgtggattcaactcacagctttgaacctttcttttgatagagcagttttgtaaaactcttttatcgaatctgcaagtagacatttggagtgctttgagggctgtggtgcaaaaggaaatgtcttcccatagaaactagactgaagcattctcagcaacttctttgtgacgtttgcattcatctcacagtgttgaacatacctttccatagagtagttttgaagcactatttttgtagaatctgcaagtggatatttggactgctttgaggccttcatcggaaacgggaataccttctcataaacactagacagaagcattctcagaaacttctttgtgatctgtccattcaactcacagagttgaaccttcctttttatggagcagttttgaaagactgtttgtggagaatctgcaagtggatatttggagcgccttgaggccaatggtagaaaaagaaatatctgcctctaaatactagactgaagcattccgagaaacttctttgtgatgtttgcattcaactagcagagttgaaccttccttttgatagggcagtttggaaacactctttgtgtagaatctgcatgtggatatctggagcggtttgaggcctacggtcaaaaaggaaatatcttcctgggaaaaatagacgaaagcattctcagaaactgctttgtgatatgggcattcgactcatcgagttgaaacttttgtttgatagagcagttttgaaacactctgtagaatctgaaagtggatatttggagatctttgagggctatggcggaaaacaaaatatattcacattaaagtagacagcagcattcttagaaacttctttaggatgtttgcagtaaactcacagagttgaacctacctttccgtagaggagttttgaaacactctgtttgtgggatccgcaagtggatatttggaccgctttgagacctttgctggaaatgggaatatcttcacatataaactagacagaagcattctcagaaacttctttgtgatgtgtgcgttgaacccagagagatgaacttttcctttgatagagcagttttgaaacgtgtttttgtaagatctgcaagcggataattggcttcgctttgtgtcctttggtggaaacgggtatatcttctaataaaaactagacagaaatattctcagaatctcctttgtgatgtgggcattcaactaacacagttgaacatttcttttaacagagcagttttgaaacactcttttggtagaatctgccagtggatatttggagcgcttggagggctattgtgccaatggaaatatctgcccctgaaaactagacagaagcattctcagaaactactttgtgatgtttgcattcaactcacagagttgaacatacctcttcatagagcagtcttgaaaacctctttttgtagaatctgcaagtggatattcggaccactttgaggccttcataggaaacagtaacatcttcacataaaaactagatagaaaacattgtcagaaagttctttgtgatgtgtgaattcaactcacagagttgaaccttcctttaatagagcagttttgaaacactctttttctagaatctgcaagtagatatttggagcgctttgaggccttcgttggaaaccggaatatcttcacaggaaaagtagatagaggcatgctcagaaacttttttgtcatatgtagattcaactcacagcgttgaacctttcttttgatagagcagttttgaaaaactcttttatcgaatctgcaagtagacatttggagtgctttgagggctgtggtgcaaaaggaaatgtcttcccatagaaactagactgaagcattctcagcaacttctttgtgacgtttgcattcatctcacagtgttgaacataccttttcatagagtagttttgaaacactatttttgtagaatctgcaagtggatatttggactgcattgaggccttcattggaaacgggaatgtcttcacataaacactagacagaagcattctcagaaactactttgtgatctgtctattcaactcacagagttgaaccttcctttttatggagcagttttgaaacactgtttttggagaatctgcaagtggatatttggagcgctttgaggcctatggtagaaaaagaaatatctgcctattacaactagacagaagcattctgagaaacttctttgtgatgtttgcattcaactaccagagttgaaccttccttttgatagggcagtttggaaacactctttttgtagaatctgcatgtggatatctggagcgatttgaggcctacggtccaaaaggaaatatcttcctgggaaaaaaagacgaaagcattctcagaaagtgctttgtgatatgtgcattcgactcaccgagttgaaacttttttttgatagagcagttttgaaacactctgtagaatctgaaagtggatagttggagctctttgacggctatggcggaaaagaaaatatattcacattaaagtagacagcagcattctcagaaacttctttaggatgtttgcagtaaactcacagagttgaacatacctttccgtagagcagttttgaaacactctgtttgtgggatccgcaagtggatatttggaccgctttgagacctttgctggaaatgggaatatcttgacgtataaactagacagaagcattctcagaaacttcttcgtgatgtgtgcagtctactcccgaatttgaatcttccttttcatgaagcagttttgaaacactctgtttgtgcaatccacaattggataattggaacgctttgatgcccatgttagaaaaggaaatatcctcatataaaaactagacagaaggattcacagaaaatgctttgtgatgtgtgcattcgaatcacggagttgaatctttcttttgttagagcagttttgaaacacggtttctgtggaatctgccagcggacacttggagcgctttgagggctatggtggagaaggaaatatcttcccataaaaactagaaagaagcattctcagaaacatgtatgtgaagcgtgcattcaactcacagagttgaaccttccttttgatacaacagttttgaaacactcttttgaacaattgcaggtgaatctttggagcgctttgaagcctttgttggaaatgggaatatcttctcacacaaactagtcagaagcattctcagaaacttctttgtgatgtgtgcgttgaacccagagagatgaacctttccttggaaagagcagttttgaaacgtgtttttgtaagatcggcaagcggataattggcttcgctttgtgtcctttggtggaaacgggaatatcttctaataaaaactagacagaaatattctcagaatctcctttgtgatgtgggcattcaactaacacagttgaacatttcttttcacagagcagttttgaaacactcttttggtagaatctgccagtggatatttggagcgcttggagggctattgggccaatggaaatatctgcccttgaaaactagacagaagcattctcagaaactgctttgtgatgtttgcattcaactcacagagttgaacataccttttcatagagcagttttgaaaacctctttttgtagaatctgcaagaggatattcggaccactttgaggccttcataggaaacagtaatatcttcacgtaaaaattagatagaaagcattgtcagaaagttctttgtgatgtgtgaattcaactcacagagttgaaccttcctttaatagagcagttttgaaacactctttttctagaatctgccagtagatatttggagcgctttgaggccttcgttggaaaccggaatatcttcacataaaaagtagatagaggcatgctcagaaacttttttgtcatatgtagattcaactcacagcgttgaacctttcttttgatagagcagttttgaaaaactcttttatcgaatctgcaagtagacatttggagtgctttgagggctgtggggcaaaaggaaatgtcttcccatagaaactagactgacgcattctcagcaacttctttgtgacgtttgcattcatctcacagtgttgaacatacctttccatagagtagttttgaagcactatttttgtagaatctgcaagtggatatttggactgctttgaggccttcatcggaaacgggaatatcttcacataaacactagacagaagcattctcagaaacttctttgtgatctgtccattcacctcacagagttgaaccttcctttttatggagcagttttgaaacactgtttgtgaagaatctgcaagtggatatttggagcgccttgaggccaatggtagaaaaagaaatatctgcctctaaatactagactgaagcattctgagaaacttctttgtgatgtttgcattcaactaccagagttgaaccttccttttgatagggcagtttggaaacactctttttgtagaatctgcatgtggatatctggagcgatttgaggcctatggtcaaaaaggaaatatcttcctgggaaaaatagacgaaagcattctcagcaactgctttgtgatatgtgcattcgactcaccgagttgaaacttttttttgatagagcagttttgaaacactctgtagaatctgaaagtggatatttggagatctttgagggctatggcggaaaagaaaatatattcacattaaagtagacagcagcattcccagaaacttctttaggttgtttgcagtaaactcacagagttgaacacacctttccgtagagcagttttgaaacactctgtttgtgggatccgcaagtggatatttggacccctttgagacctttgctggaaatgggaatatcttcacatataaactagacagaagcattctcagaaacttcttcgtgatgtgtgtattctactcccaaatttgaatcttccttttcatgaagcagttttgaaacactctatttgtgcattctacaattggatgattggaacgctttgatgcccatggtagaaaaggaaatatcctcatataaaaactagacagaaggattcacagaaaatgctttgtgatgtgtgcattcaaatcacggagttgaatctttcttttgttagagcagttttgaaacactgtttctgtggaatctgccagcggacccttggagcgctttgagggctacggtggagaaggaaatatcttcacataaaaactagaaagaagccttctcagaaacatgtatgtgaagcgtgcattcaactcacagagttgaaccttccttttgatagaacagttttgaaacactcttttgaacaattgcaggtgaatctttggagcgctttgaagcctttgttggaaatgggaatatcttcacacacaaactagccagaagcattctcagaaacttctttgtgatgtgtgcgttgaacccagagagatgaacctttcctttgatagagcagtttggaaacgtgtttttgtaagatcggcaagcggataattggcttcgctttgtgtcctttggtggaaacgggaatatcttctaataaaaactagacagaaatattctcagaatcttctttgtgatgtgggtattcaactaacacagttgaacctttcttttgacagagcagttttgaaacacacttttagtagaatctgcccgtggatatttggggcgctttgagggctattgtgcaaatggaaatatcttcacctaaatactagacagaagcattctcagaaactgctttgtgatgtttgcattcaactgacagagttgaacatacctcttcatagagcagttttgaaaacctctttttgtagaatctgcaagtggatattcggaccactttgaggccttcataggaaacagtaatatcatcacacaaaaactagatagaagcattgtcagaaagttcgttgtgatgtgtgaattcaactcacagagttgtagcttcctttaatagagcagttttgaaacactctttttctagagtctgcaagtagatatttggagcgctttgaggccttcgttggaaaccggaatatcttcacataaaaagtagatagaggcatgctcagaaacttttttgtcatatgtagattcaactcacagcgttgaacctttcttttgatagagcagttttgaaaaactcttttatcgaatctgcaagtagacatttggagtgctttgacggctctggtgcaaaaggaaatgtcttcccatagaaactagactgaagcattctcagcaacttcttggtgacgtttgcattcatctcacagtgttgaacatacctttccatagagtggttttgaaacactgtttttgtagaatcggcaagtgggtgtttggactgctttgaggccttcatcggaaacgggaatatcttcacataaacactagagagaagcactctcagaaacttctttgtgatctgtccattcaactcacagagttgaaccttcctttttctggagcagttttgaaacactctttttggagaatctgcaagtggatatttggagcgctttgaggcctatggtagaaaaagaaatatctgcctctaaaaaccagacagaagcattccgagaaacttctctgtgatgtttgcattcaagtagcagagttgaaccttccttttgatagggtagtttggaaacactctttttgtagaatctgcatgtggatatctgtagcggtttgaggcctacggtcaaaaaggaaatatcttcctgggaaaaatagacgaaagcattctcagaaagggctttgtgatatgcgcattcgactcaccgagttgaaacttttttttgatagagcagttttgaaacactctgtagaacctgaaagtggatatttggagctctttcagggctatgacggaaaagaaaatatattcacattaaagtagacagcagcattctcagaaacttctttaggatgtttgcagtaaactcacagagttgaacctacctttccgtagagcagttttgaaacactttgtttgtgggatccgcaagtggatatttggaccgctttgagacctttgctggaaatgggaatatcttcacatataaactagacagaagcattctcagaaacttcctcttgatgtgtgcattctactcccgaatttgaatcttccttttcatgaagcagttttgaaacactctgtttgtgcaatccacaattggataattggaacgctttgatgcccatggtagaaaaggaaatatcctcatataaaaactagacagaaggattcacagaaaatgctttgtgatgtgtgcattcaaatcaccggagttgaatctttcttttgttagagcagttttgaaacactgtttctgtggaatctgccagcggacacttggagcgctttgagggctatggtggagaaggaaatatcttcacataaaaactagaaagaagcattctcggaaacatttatgtgaagcgtgccttcaactcacagagttgaaccttccttttgatagaacagttttgaaacactcttttgaacaattgcaggtgaatctttggagcgctttgaaggctttgttggaaatgggaatatcttcccacacaaactagccagaagcattctcagaaacttctttgtgatgtgtgcgttgaacccagcagagatgaacctttcctttgatagagcagttttgaaacgtgtttttgtaaggtctgcaagcggataatgggcttcgctttgtgtcctttggtggaaacgggaatatcttctaataaaaactagacagaaatattctcagaatctcctttgtgatgtgggcattcaacttacacagttgaacatttcttttcacagagcagttttgaaacactcttttggtagaatctgccagtggatatttggagcgcttggagggctattgtgccaatggaaatatctgcccctgaaaactagacagaagcattctcagaaactgctttgtgatgtttgcattcaactcacagagttgaacctacctcttcatagagcagtttggaaaacctcttcttgtagaatctgcaagtgggtattcggaccactttgaggccttcataagaaacagtaatatcttcacataaaaactagatagaagcattgtcagaaagctctttgtgatgtgtgaattcaactcacagagttgaaccttcctttaatagagtagttttgaaacactctttttctagaatctgcaagtagatatttggagtgctttgaggccttcgttggaaaccggaatatcttcacaggaaaagtagatagaggcattctcagaaacttttttgtgatatgtagattcatctcacagcgttgaacctttcttttgatagagtagtttggaaaaactcttttatcgaatctgcaagtagacatttggagtgctttgagggctgtggtgcaaaaggaaatgtcttcccatagaaactagactgaagcattctcagcaacttctttgtgacgtttgcattgatctcacagtgttgaacatacctttgcatagagtagttttgaaacactatttttgtagaatctgcaagtggatatttggactgctttgaggccttcatcggaaacgggaatatcttcacataaacactggacagaagcatcctcagaaacttctttgtcatctgtccattcaactcacagagttgaaccttcctttttctggagcagttttgaaacactctttttggagaatctgcaagtggatatttggagcgctttgaggcctatggtagaaaaagaaatatctgcccctaaacaccagacagaagcattccgagaaacttctttgtgatgtttgcattcaactagcagagttgaaccttccttttgatagggcagtttggaaacactctttttgtagaacctgcatgtggatatctggagcggtttgaggcctacggtcaaaaaggaaatatcttcctgggaaaaatagacgaaagcattctcagaaactgctttgtgatatgtgcattcgactctccgagttgaaacttttttttgatagagcagttttgaaacactctgtagaatctgaaagtggatatttggagctcttcgagggctatggcggaaaagaaaatatattcacattaaactagacagcaagcattcccagaaacttctttaggttgtttgcagtaaactcacagagttgaacacacctttccgtagagcagttttgaaacactctgtttgtgggatccgcaagtggatatttggacccctttgagacctttgctggaaacgggaatatcttcacatataaactagacagaagcattctcagaaacttcttcggtgatgtgtgcattgtactcccaaatttgaatcttccttctcatggagcagttttgaaacactctgtttgtgcaatctacaattggagaattggaacgcttggattcccatggtagaaaaggaaatatcctcatataaaaactagacagaaggattcacagaaaatgctttgtgatgtgtgcattcaaatcacggagttgaatctttcttttgttagagcagttttgaaagactgtttctgtggaatctgccagcggacacttggagcgctttgagggctacggtggagaaggaaatatcttcacataaaaactagaaagaagcattctcagaaacatttatgtgaagcgtgcattcaactcacagagttgaaccttccttttgatacaacagttttgaaacactcttttgaacaattgcaggtgaatctttggagcgctttgaagcctttgttggaaatgggaatatcttcacacacaaactatccagaagcattctcggaaacttctttgtgatgtgtgcgttgaacccagagagatgaacctttcctttgatagagcagttttgaaacgtgtttttgtaagatctgcaagcggatagttggcttcgctttgtgtcctttggtggaaacgggaatatcttctaataaaaactagacagaaatattctcagaatcttcttcgtgatgtgggcattcaactaacacagttgaacctttcttttcacagagcagttttgaaacacccttttggtagaatctgccagtggatatttggagcgctttgagggctattgtgccaacggaaatatctgcccctaaaaactagacagaagcattctcagaaactgcttcgtgatgtttgcattcaactcacagggttgaacatacctctgcatggagcagttttgaaaacctctttttgtagaatctgcaagtggatattcggaccactttgaggccttcataggaaacagtaatatcttcacataaaaactagatagaagcattgtcagaaagttctttgtgatgtgtgaattcaactcacagagttgaaccttccttcaatagagcagttgtgaaacattctttttctagaatctgcaagtagatacttggagcgctttgaggccttcgttggaaaccggaatatcttcacaggaaaagtagatagaggcattctcagaaacttttttgtgatatgtagattcaactcacagcgttgaacctttctttggatggagcagttttgaaaaactcttttatcgaatctgcaggtagacatttggggtgctttgagggctgtggtgcaaaaggaaatgttcttcccatagaaactagactgaagcattctcagcaacttcttggtgacgtttgcattcatctcacagtgttgaacatacctttccatagagtggttttgaagcactgtttctgtagaatcggcaagtggatatttggactgctttgaggccttcatcggaaacgggaatatcttcacataaacactagagagaagcattctcagaaacttctttgtcatctgtccattcaactcacagagttgaaccttcctttttatggagcagttttgaaacactccttttggagaatctgcaagtggatatttggagcgctttgaggcctatggtagaaaaagaaatatctgcctctaaaaaccagacggaagcattccgagaaacttctgtgtgatgtttgcattcaactagcagagttgaaccttccttttgatagggcagtttggaaacactctttttgtagaatctgcatgtggatatctggagcggtttgaggcctacggtcaaaaaggaaatatcttcctgggaaaaatagacgaaagcattctcagaaagtgctttgtgatatgtgcattcgactcagcgagctgaaacttttttttgatagagcagttttgaaacactctgtagaatctgaaagtggatatttggagctctttgagggctatggcggaaaagaaaatatattcacattaaaaaagtagacagcagcattctcagaaacttctttaggatgtttgcagtaaactcgcagagtttaacatacctttccgtagagcagttttgaaacactctgtttgtgggatccgcaagtggatatttggaccgctttgagacctttgctggaaatgggaatatcttcacgtataaactagacagaagcattctcagaaacttctttttgatgtgtgcattgtactcccaaatttgaatcttccttctcatgtagcagttttgaaacactctgtttgtgcaatctacaattggataattggaaccctttgatgcccatggtagaaaaggaaatatcctcatataaaaactagacagaaggattcacagaaaatgctttgtgatgtgtgcattcaaatcacggagttgaatctttcttttgttagagcagttttgaaacactctttctgtggaatctgccagcggacacttggagtgctttgagggctgtggtggagaaggaaatatcttcccataaaaactagaaagaagcattctcagaaacatttatgtgaagcgtgcattcaactcacagagttgaaccttccttttgatacaacagttttgaaacacgcttttgaacaattgcaggtgaatctttggagcgctttgaagcctttgttggaaatgggaatatcttcacacacaaactagccagaagcattctcagaaacttctttgtgatgtgtgcgttgaacccagagagatgaacctttcctttgatagagcagttttgaaacgtgtttttgtaagatctgcaagtggataattgtcttcgctttgtgtcctttggtggaaacgggaatatcttctaataaaaactagacagagatattctcagaaatttctttgtgatgtgggcattcatctaacacagtcgaagatttcttttcacagagcagttttgaaacactcttttggtcgaatctgccagtggatatttggagcgctttgagggctattgtgccaatggaaatatctgcccctaaaaactagacagaagcattctcagaaactactttgtgatgtttgcattcaactcacagagttgaacatacctcttcatagagcagttttgaaaacctcttttggtagaatctgcaagtagatattcggaccactttgaggccttcataggaaacagtaataccttcacataaaaactagatagaagcattgtcaggaagttctttgtgatgtgtgaattaaactcacagagttgaaacttcctttaatagagcagtgttgaaacactctttttctagaatctgcaaggagatatttggggcgcttggaggccttcgttgtaaaccggaatatcttcacaggaaatgtagatagacgcattctcagaaactctttgtgatatgtagattcaactcacagcgttgaacctttctttggatggagcagttttgaaaaactcttttatcgaatctgcaggtagacatttggggtgctttgagggctgtggtgcaaaaggaaatgtcttcccatagaaactagcctgaagcattctcagcaaattccttgtgacgtttgcattcatctcacagtgttgaacatacctttccatagagtagttttgaaacactatttttgtagaatctgcaagtggatatttggactgctttgaggccttcatcggaaacgggaatatcttcacataaacactagacagaagcattctcagaaacttctttgtgatctctccattcaactcacagagttgaaccttcctttttatggagcagttttgaaacactccttttggagaatctgcaagtggatatttggagcgcgttgaggcctatggtagaaaaagaaatatctgcctctaaaaaccagacagaagcattctgagaaacttctttgtgatgtttgccttcaactaccagagttgaaccttccttttgatagggcagtttggaaacactctttttgtagaatctgcatgtggatatctggaacgatttgaggcctacggtccaaaaggaaatatcttcctgggaaagatagacgaaagcattctcagaaagtgctttgtgatatgtgcattcgactcaccgagttgaaacctttttttgatagagcagttttgaaacactctgtagaatctgaaagtggatatttggagctctttgagggctatggcggaaaagaaaatatattcacattaaagtagacagcagcattctcagaaacttctttaggatgtttgcagtaaactcacagagttgaacatacctttccgtagagcagttttgaaacactctgtctgtgggatccgcaagtggatatttgggccgctttgagacctttgctggaaatgggaatatcttcacatataaactagacagaagcattctcagaaacttcctcgtgatgtgtgcattctactcccgaatttgaatcttccttttcatgaagcagttttgaaacactctgtttgtgcaatccacaattggataattggaacgctttgatgcccatggtagaaaaggaaatatcctcatataaaaactagacagaaggattcacagaaaatgctatgtgatgtgtgcattcaaatcacggagttgaatctttcttttgtcagagcagttttgaaacactgtttctgtggaatctgccagcggacacttggagcgctttgagggctatggtggagaaggaaatatcttcccataaaaactagaaagaaatattctcagaatcttctttgtgatgtgggcattcaactaacacagttgaacatttcttttcacagaacagttttgaaacactcttttgaacaattgcaggtgaatctttggagcgctttgaagcctttgttggaaataggaatatattcacacacaaactagccagaagcattctcagaaacttctttgtgatgtgtgcgttgaacccagagagatgaacctttccttggatagagcagttttgaaacgtgtttttgtaagatctgcaagtggataattggcttcgctttgtgtcctttggtggaaacgggaatatcttctaataaaaactagacagaaatattctcacaatcgtctttgtgatgtgggcattcaactaacacagttgaacatttcttttcacagagcagttttgaaacactcttttgctagaatctgccagtggatacttggagcgctttgagggctattgtgccaatggagatatcttcccctaaaaactagacagaatcattctcagaaactgctttgtgatgtttgcattcaactcacagagttgaacctacctcttcatagagcagtttggaaaacctcttcttgtagaatctgcaagtggatattcggaccactttgagaccttcataggaaacagtaatatcttcacataaaaactagatagaagaattgtcagaaagttctttgtgatgtgtgaattcaactcacagagttgaaccttcctttaatagagtagttttgaaacactctttttctagaatctgccagtagatatttggagcgctttgaggccttcgttggaaaccggaatatcttcacataaaaagtagatagaggcattctcagaaactttttcgtgttatgtggattcaactcacagcgttgaacctttcttttgatagagcagttttgtaaaactcttttatcgaatctgcaagtagacatttggagtgctttgagggctgtggtgcaaaaggaaatgtcttcccatagaaactagactgaagcattctcagcaacttcttggtgacgtttgcattcatctcacagtgttgaacatacgtttccatagagtggttttgaaacactgtttttgtagaatcggcaagtggatatttggactgctttcaggccttcatcggaaacgggaatattcttcacataaacactagagagaagcattctcagaaacttctttgtgatctgtccattcaactcacagagttgaaccttcctttttatggagcagttttgaaacactgtttttggagaatctgcaagtggatatttggagcgctttgaggcctatggtagaaaaataaatatctgcctctaaaaactagacagaagcattctgagaaacttctttgtgatgtttgcattcaactaccagggttgaaccttgcttttgataggtcagttttgaaacactctttttgtagaatctgcatgtggatatctggagcgatttgaggcctacggtccaaaaggaaatatcttcctgggaaaaatagacgaaagcattctcagaaactgctttgtgatatgtgcattcgactctccgagttgaaactttttttggatagagcagttttgaaacactctgtagaatctgaaagtggatatttggagctctttgagggctatggcggaaaagaaaagatattcacattaaactagacagcagcattctcagaaacttctttaggatgtttgcagtaaactcacagagttgaacatacctttccgtagagcagttttgaaacactctgtttgtgggatccgcaagtggatatttggaccgctttgagacctttgctggaaatgggaatatcttcacgtataaaatagacagaagcattctcagaaacttcttcgtgatgtgtgcattctcctcccgaatttgaatcttctttttcatgaagcagttttgaaacactctgtttgtgcaatccacaattggataattggaacgctttgatgcccatggtagaaaaggaaatatcctcatataaaaactagacagaaggattcacagaaaatgctttgtgaagtgtgcattcaaatcacggagttgaatctttcttttgttagagcagttttgaaacactgtttctgtggaatctgccagcggacacttggagcgctttgagggctgtggtggagaaggaaatatcttcccataaaaactagaaagaagcattctcagaaccatttatgtgaagcgtgcattcaactcacagagttgaaccttccttttgatagaacagttttgaaacactcttttgtacaattgcaggtgaatatttggagggctttgaagcctttgttggaaatgggaatatcttcacacacaaagtagccagaagcattctcagaaacttctttgtgatgtgtgcgttgaacccagagagatgaacctttcctttgatagagcagttttgaaacgtgtttttgtaagatctgcaaggggataatgggcttcgctttgtgtcctttggtggaaacgggaatatcttctaataaaaactagacagaagcattctcagaaacttctttgtgatgtgtccattcaactcacagagttgaaccttcctttttatggagccgttttgaaacactgtttttgtagaatctgcaagtggatatttggagcgctttgaagcctatggtagagaaagaaatatctgcatatcaaaactagacagaagcattctcagaaactgctttgtgatgtttgcattcaactaccagagttgaacttccctcttcatagagcagttttgaaatcctctttttgtagaatctgcaagtggatatttggaccactttgaggccttcagaagaaatagtaatatcttcacataaaaactagatagtagcattctcagaaacttctttgtgatgtgtgaattcaactcacagagtagaaccttccttcaatagagcagttttcaaacactcttttggtagaatctgcaagtagatatttggagcactttgaggccttcattggaaactggaatatcttcacataaaaagtagatagaggcatgctcagaaacttttttgtcatatgtagattcaactcacagcgttgaacctttcttttgatagagcagtttcgaaaaactcttttatcgaatctgcaagtagacatttggagtgctttgagggctctggtgcaaaaggaaatgtcttcccatagaaactagactgaagcattctcagcaacttctttgtgacgtttgcattcatctcacagtgttgaacatacctttccatagagaagttttgaaacactaattttgtagaatctgcaagtggatatttggactgctttgaggccttcatcggaaacgggaatatcttcacataaacactagacagaagcattctcagaaactactttgtgatctgtccattcaactcacagagttgaaccttcctttttatggagcagttttgaaacactgtttttggagaatctgcaagtggatatttagagcgctttgaggcctatggtagaaaaagaaatatctgcctctaaaaactagacagaagcattccgagaaacttctttgtgatgtttgcattcaactagcagagttgaaccttccttttgatagggcagtttggaaacactctttttgtagaacccgcatgtggatatctggagcggtttgaggcctacggtcaaaaaggaaatatcttcctgggaaaaatagacgaaagcattctcagaaagtgctttgtgatatgtgcattcgactcaccgagttgaaacttttttttgatagagcagttttgaaacactctgcagaatctgaaagtggatatttggagctctttgagggctatggcggaaaagaaattatattcacattaaagtagacagcagcatgcccagaaacttctttaggatgtttgcagtaaactcacagagttgaacatacctttccgtagagcagttttgaaacactctgtttgtgggatccgcaagtggatatttggaccgctttgagacctttgctggaaacgggaatatcttcacatataaactagacagaagcattctcagaaacttcctcgtgatgtgtgcattctactcccgaatttgaatcttccttttcatgaagcagttttcaaacactctgtttgtgcaatccacaattggataattggaacgctttgatgcccatggtagaaaaggaaatatcctcatataaaaactagacagaaggattcacagaaaatgctttgtgatgtgtgctttcaaatcacggagttgaatctttcttttgtcagagcagttttgaaacactgtttctgtggaatctgccagcggacacttggagcgctttgagggctgtggtggagaaggaaatatcttcccataaaaactagaaagagaagcattctcagaaacatttatgtgaagcgtgcattcaactcacagagttgaaccttcctttggatacaacagttttgaaacactcttttgaacaattgcaggtgaatctttggagcgctttgaagcctttgttggaaatgggaatatcttcacacacaaactaaccagaagcattctcagaaacttctttgtgatgtgtgcgttgaacccagagagatgaacctttccgttgatagagcagttttgaaacgtgtttttgtaagatcggcaagcggataattggcttcgctttgtgtcctttggtggaaacgggaatatcttctaataaaaactagacagaaatattctcagaatctcctttgtgatgtgggcattcaactaacacagttgaacatttcttttcacagagcagttttgaaacacacttttggtcgaatctgccagtggatatttggagcgctttgagggctgttgtgccaatggaaatatctgcccctaaaatctagacagaagcattctcagaaactacttcgtgatgtttgcattcaactcagagagttgaacatacctcttcacagagcacttttgaaaacctctttttgtagaatctgcaagtggatattcggagcactttgaggccttcataggaaacagtaatatcttcgcataaaaactagatagaagcattgtcagaaagttctttgtgatgtgtgaattcaactcacagagttgaaccttcctttaatagagcagttttgaaacactctttttcgagaatctgccagtagatatttggagcgctttgaggccttcgttggaaaccggaatatcttcacataaaaagtagatagaggcattctcagaaacttttttgtgatatgtagattcaactcacagcgttgaatctttctttggatggagcagttttgaaaaactcttttatcgaatctgcaggtagacatttggggtgctttgcgggctctggtgcaaaaggaaaagtcttcccatagaaactagactgaagcattctcagcaacttctttgtgacgtttgcattcatctcacagtgttgaacatacctttccatcgagtacttttgaaacactgtttttgtagaatctgcaagtggatatgtggactgctttgaggccttcatcggaaacgggaatatcttcacataaacactagagagaagcattctcagaaacttctttgtggtctgtccattcaaatcacagagttgaaccttcctttttatggagcagttttgaaacactgtttttggagaatctgcaagtggatatttggagcgctttgaggcctatggtagaaaaagaaatatctgcctatgacaaatagacagaagcattctgagaaacttctttgtgatgtttgcattcaactaccagagttgaaccttccttttgatagggcagtttggaaacactctttttgtagaatctgcatgtggatatctggagtgatttgaggcctacggtccaaaaggaaatatcttcctgggaaaaaaagacgaaagaattctcagaaactgctttgtgatatgtgcattcgactcaccgagttgaaacttttttttgatagagcagttttgaaacactctgtagaatctgaaagtggatatttggagctctttgagggctatggcggaaaagaaaatatattcacattaaactagacagcagcattcccagaaacttctttaggatgtttgcagtaaactcacagagttgaacatacctttccgtagagcagttttgaaacactctgtttgtgggatccgcaagtggatatttggaccgctttgagacctttgctggaaacgggaatatcttcacatataaactagatagaagcattctcagaaacgtcttcgtgatgtgtgcattgtactcccaaatttgaatcttccttctcatggagcagttttgaaacactctgtttgtgcaatctacaattggagaattggaaggcttagatgaccgtggtagaaaaggaaatatcctcatataaaaactagacagaaggattcacagaaaatgctttgtgatgtgtgcattcaaatcacggagttgaatctttcttttgttagagcagttttgaaacactgtttctgtggaatctgccagcggacacttggagcgctttgagggttatggtggagaaggaaatatcttcacataaaaactagaaagaaagcattctcagtaaacatttatgtgaagcgtgcattcaactcacagagttgaaccttcctttggatacaacagttttgaaacactcttttgaacaattgcaggtgaatctttggagcgctttgaagcctttgttggaaatgggaatatcttcacacacaaactagccagaagcattctcagaaacttctttgtgatgtgtgcgttgaacccagagagatgaacctttccttggatagagcagttttgaaacgtgtttttgtaagatcggcaagcggataattggcttcgctttgtgtcctttggtggaaacgggaatatcttctaataaaaactagacagaaatattctcacaatcatctttgtaatgtgggcattcaactaacacagttgaacatttcttttcacagagcagttttgaaacactcttttcctagaatctgccagtggatacttggagcgctttgagggctattgtgccaatggagatatcttcccctaaaaactagacagaagcattctcagaaactgcttcgtgatgtttgcattcaactcacagggttgaacatacctctgcatagagcagttttgaaaacctctttttgtagaatctgccagtggatattcggaccactttgaggccttcataggaaacagtaatatcttcacataaaaactagatagaagcattgtcagaaagttctttgtgatgtgtgaattcaactcacagagttgaaccttcctttagtagagcagttttgaaacactctttttctagaatatgcaagtagatatttggagcgctttgaggccttcgttgaaaaccggaatatcttcacatagaaagtagatagaggcattctcagaaacttttttgtgatatgttgattcatctgacagcgttgaacctttcttttgatagagcagttttgaaaaactcttttgttgaatctgcaagtagacatttggagtgctttgagggctgtggtgccaaaggaaatgtcttcccatggaaactagactgaaagcattctcagcaacttctttgtgacgtttgcattgatctcacagtgttgaacatacctttgcatagagtagttttgaaacactatttttgtagaatctgcaagtggatatttggactgctttgaggcctccatcggaaacgggaatatcttcacataaacactggacagaagcattctcagaaacttctttgtgatctgtccattcaactcacagagttgaaccttcctttttatggagcagttttgaatcactgtgtttggagaatctgcaagtggatatttcgagcgctttgaggcctatggtagaaaaagaaatatctgcctctaaaaaccagacagaagcattccgagaaacttctttgtgatgtttgcattcaactagcagagttgaaccttccttttgatagggcagtttggaaacactctttttgtagaatctgcatgtggatatctggagcggtttgaggcctacggtcaaaaaggaaatatcttcctgggaaaaattgacgaaagcattctcagaaagtgctttgtgatatgtgcattcgactcaccgagttgaaacttttttttgatacagcagttttgaaacactctgtagaatctgaaagtggatatttggagctctttgagggctatggcggaaaagaaaatatattcacattaaagtagacagcagcattctcagaaacttctttaggatgtttgcagtaaactcacagagttgaacctacctttctgtagagcagttttgaaacactctgtttgtgggatccgcaaggggatatttggaccgctttgagacctttgctggaaatgggaatatcttcacatataaactagacagaagcattctcagaaacttcttcgtgttgtgtgcattctcctcccgaatttgaatcttccttttcatgaagcagttttgaaacactctgtttgtgcaatccacaattggataattggaacgctttgatgcccatggtagaaaaggaaatatcctcatataaaaactagacagaaggattcacagaaaatgctttgtgatgtgtgcattcaaatcacggagttgaatctttcttttgtcagagcagttttgaaacactgtttctgtggaatctgccaggggacacttggagcgctttgagggctatggtggagaaggaaatatcttcccataaaaactagagagaagcattctcagaaacatttatgtgaagcgtgcattcaactcacagagttgaaccttccttttgatagaacagttttgaaacactcttttgaacaattgcaggtgaatctttggagcgctttgaagcctttgttggaattgggaatatcttcacacacaaactagccagaagcattctcagaaacttctttgtgatgcgtgcgttgaacccagagagatgaacctttcctttgatagagcagttttgaaacgtgtttttgtaaggtctgcaagcggataatcggcttcgctttgtgtcctttggtggaaacgggaatatcttctaataaaaactagacagaaatattctcagaatctcctttgtgatgtgggcattcaactaacacagttgaacatttcttttcacagagcagttttgaaacactcttttggtagaatctgccagtggatatttggagcgcttggagggctactgtgccaatggaaatatctgcccctgaaaactagacagaagcattctcagaaactacttcgtgatgtttgcattcaacacacagagttgaacatacctcttcacagagcagttttgaaaacctctttctggagaatctgcaagtggatattcggaccactttgaggccttcataggaaacagtaatatcttcacataaaaactagatagaagcatggtcagaaagttctttgtgatgtgtgaattcaactcacagagttgaaccttcctttaatagagcagttttgaaacactctttttctagaatctgcaagtagatatttggagcgctttgaggccttcgttggaaaccggaatatcttcacaggaaaagtagatagaggcattctcagaagcttttttgtgatatgtagattcaactcacagtgttgaacctttctttggatggagcagttttgaaaaactcttttatcgaatctgcaggtagacattcggggtgctttgagggctgtggtgcaaaaggaaatgtcttcccatagaaactagactgaagcattctcagcaacttcttggtgacgtttgcattcatctcacagtgttgaacatacctttccatagagtggttttgaaacactgtttttgtagaatcggcaagtggatatttggactgctttgaggccttcatcggaaacgggaatatcttcaaataaacactagagagaagcattctcagaaacttctttgtggtctgtccattcaactcacagagttgaaccttcctttttatggagcagttttgaaacactgttttcggaggatctgcaagtggatatttggagcactttgaggcctatggtagaaaaagaaatatctgcctatgacaactagacagaagcattccgagaaacttctctgtgatgtttgaattcaagtagcagagttgaaccttccttttgatagggtagtttggaaacactctttttgtagaatctgcatgtggatatctggagcggtttgaggcctacggtcaaaaaggaaatatcttcctgggaaaaatagacgaaagaattctcagaaactgctttgtgatatgtgcattcgactcaccgagttgaaactttttttttgatagagcagttttgaaacactctgtagaatctgaaagtggatatttggagctctttgagggctatggcggaaaagaaaatatattcacattaaactagacagcagcattcccagaaacttctttaggatgtttgcagtaaactcacagagttgaacatacctttccgtagagcagtattgaaacactctgtttgtgggatccgcaagtggatatttggaccgctttgagacctttgctggaaacgggaatatcttcacatataaactagacagaagcattctcagaaacttcttcgtgatgtgtgcattctcctcgcgaatttgaatcttccttttcatgaagcagttttgaaacactctgtttgtgcaatccacaattggataattggaacgctttgatgcccatggtagaaaaggaagtatcctcatataaaaactagacagaaggattcacagaaaatgctttgtgttgtgtgcattcaaatcacggagttgaatctttcttttgtcagagcagttttgaaacactgtttctgtggaatctgccagcggacacttggagcgctttgagggctatggtggagaaggaaatatcttcccataaaaactagaaagaagcattctcggaatcatttatgtgaagcgtgccttcaactcacagagttgaaccttccttttgatagaacagttttgaaacactcttttgaacaattgcaggtgaatctttggagcgctttgaagcctttgttggaaatgggaatatcttcacacacaaactagccagaagcattctcagaaacttctttgtgatgtgtgcgttgaacccagagagatgaacctttcctttgatagagcagttttgaaacgtgtttttgtaagatgctgcaagcggataattggcttcgctttgtgtcctttggtggaaacgggaatatcttctaataaaaactagacagaaatattctcagaatcttctttgtgatgtgggcattcaacaaacacagttgaacatttcttttcacagagcagttttgaaacactcttttggtagaatctgccagtggatatttggagcgctttgagggctattgtgccaatggaaatatcttcccctaaaaactagacagaagcattctcagaaactacttcgtgatgtctgcattcaacacacagagttgaacatacctcttcagagagcagttttgaaaacctctttctgtagaatctgcaagtggatattcgggccactttgaggccttcataggaaacagtaatatcttcacataaaaactagatagaagcattgtcagaaagttctttgtgatgtgtgaattcaactcacagagttgaaccttccttcaatagagcagttttgaaacactctttttctagaatctgcaagtagatatttcgagcgctttgaggccttcgttggaaaccggaatatcttcacaggaaaagtagatagaggcattctcagaaacatttttgtgatatgtagattcaactcacagcgttgaacctttctttggatggagcagttttgaaaaactcttttatcgaatctgcaggtagacatttggggtgctttgagggctgtggtgcaaaaggaaatgtcttcccatagaaactagactgaatcattctcagcaacttcttggtgacgtttgcattcatctcacagtgttgaacatacctttgcatagagtagtttcgaaacactatttttgtagaatctgcaagtggacatttggactgctttgaggccttcatcggaaacgggaatatcttcacataaacactagacagaagcattctcagaaacttctttgtggtctgtccattcaactcacagagttgaaccttcctttttatggagcagttttgaaacactgtttttggaggatctgcaagtggatatttggagcgctttgaggcccatcgtagaaaaagaaatatctgcctatgacaactagacagaagcattctgagtaaacttctttgtgatgtttgcattcaactaccagagttgaatcttccttttgatagggcagtttggaaacactctttttgtagaatctgcatgtggatatctggagcgatttgaggcctacggtccaaaaggaaatatcttcctgggaaaaatagaggaaagcattctcagaaagtgctttgtgatatgtgcattcgactcaccgatttgaaacctttttttgatagagcagttttaaaacacactgtagaatctgaaagtggatatttggagctctttgagggctatggcggaaaagaaaatatattcacattaaagtagacagcagcattcccagaaacttctttaggatgtttgcagtaaactcacagagttgaacatacctttccgtagagcagctttgaaacactctgtttgtgggatccgcaagtggatatttggaccgctttgagacctttgctggaaacgggaatatcttcacatataaactggacagaagcattctcagaaacttcttcgtgatgtgtgcattctactcccgaatttgaatcttccttttcatgaagcagttttgaaacactctgtttgtgcaatccacaattggataattggaacgctttgatgtccatggtagaaaaggaaatatcctcatataaaaactagacagaaggattcacagaaaatgctttgtgatgtgtgcattcagatcacggagttgaatctttcttttgtgagagcagttttgaaacactgtttctgtgcaatctgccagcggacacttggagcgctttgagggctatggtggagaaggaaatatcttcacataaaaactagaaagaagcattctcagaaacatttatgtgaagcgtgccttcaactcacagagttgaaccttccttttgatacaacagttttgaaacactctttggaacaattgcaggtgaatctttggagcgctttgaagcctttgttggaaatgggaatatcttcacacacaaactagccagaagcattcccagaaacttctttgtgatgtgtgcgttgaacccagagagatgaacctttcctttgatagagcaggtttgaaacgtgtttttgtaagatctgcaagcggataattggctttgctttgtgtcccttggtgaaaacgggaatatcttctaataaaaactagacagaaatattctcacaatcatctttgtgatgtgggcattcaactaacacagttgaagatttcttttcacagagcagttttgaaacactcttttgctagaatctgccagtggatacttggagcgctttgagggatattgtgccaatggaaatatcttcccctaataactagacagaagcattctcagaaactacttcgtgatgtttgcattcaactcacagcgttgaacatacctcttcatagagcagttttgaaaacctctttctgtagaatctgcaagtggatattcggaccactttgaggccttcataggaaacagtaatatcttcacataaaaactagatagaagcattgtcagaaagttcttggtgatgtgtgaattaaactcacagagttgaaccttcctttaatagagcagttttgaaacactctttttctagaatctgcaagtagatatttggagcgctttgaggccttcgttggaaaccggaatatcttcacaggaaaagtagatagaggcattctcagaaacttttttgtgatatgtagattcaactcacagcgttgaacctttctttgcatggagcagttttgaaaaactcttttatcgaatctgcaggtagacatttggggtgctttgagggctctggtgcaaaaggaaaagtcttcccatagaaactagactgaagcattctcagcaacttcttggtgacgtttgcattcatctcacagtgttgaacatacctttccatagagtggttttgaaacactgtttttgtagaatcggcaagtggatatttggactgctttgaggccttcatcggaaacgggaatatcttcacataaacactacagagaagcattctcagaaacttctttgtcatctgtccattcaactcacagagttgcaccttcttttttatggagcagttttgaaacactccttttggagaatctgcaagtggatatttggagcgctttgaggcctatggtagaaaaagaaatatctgcctctaaaaaccagacagaagcattccgagaaactcctttgtgatgtttgcattcaactagcagagttgaaccttccttttgatagggcagtttggaaacactctttttgtagaatctgcatgtggatatctggagcggtttgaggcctacggtcagaaaggaaatatcttcctgggaaaaatagacgaaagcattctcagaaagtgctttgtgatatgtgcattcgactcaccgagttgaaacttttttttgatagagcagttttgaaacactctgcagaatctgaaagtggatatttggagctctttgagggctatggcggaaaagaaaatatattcacagtaaagtagacagcagcattcccagaaacttctttaggatgtttgcagtaaactcacagagttgaacatacctttccgtagagcagctttgaaaaactctgtgtgtgggatccgcaagtggatatttggaccgctttgagacctttgctggaaacgggaatatcttcacatataaactggacagaagcattctcagaaaattcttcgtgatgtgtgcattgtactcccaaatttgaatcttccttctcatggagcagttttgaaacactctgtttgtgcaatctacaattggagaattggaacgcttggatgcccgtggtagaaaaggaaatatcctcatataaaaactagacagaaggattcacagaaaatgctttgtgatgtgtgcattcaaatcacggagttaaatctttcttttgttagagcagttttgaaacactgtttctgtggaatctgccagcggacccttggagcgctttgagggctacggtggagaaggaaatatcttcacataaaaactagaaagaagcattctcggaaacatttatgtgaagcgtgcattcaactcacagagttgaaccttccttttgatagaacagttttgaaacactcttttgaacaattgcaggtgaatctttggagcgctttgaagcctttgttggaaatgggaatatcttcacacacaaactagccagaagcattctcagaaacttctttgtaatgtgtgcgttgaacccagagagatgaacctttccttcgatagagcagttttgaaacgtgtttttgtaagatcggcaagcggataattggcttcgctttgtgtcctttggtggaaacgggaatatacttctaataaaaactagacagaaatattctcagaatctcctttgtgatgtgggcattcaactaacacagttgaacatttcttttcacagagcagttttgaaacactcttttggtagaatctgcatgtggatatttggagcgcttggagggctattgtgccaatggaaatatctgcccctgaaaactagacagaagcattctcagaaactgcttcaggatgtttgcattcaactcacagagttgaacatacctctgcatagagcagttttgaaaacctctttttgtagaatctgcaagtggatattcggaccactttgaggccttcatgggaaacagtaatatcttcacataaaaactagatagaagcattgtcagaaagttctttgtgatgtgtgaattcaactcacagagttgaaccttcctttaatagagcagtcttgaaacactctttttctagaatctgcaagtagatatttggagcgctttgaggccttcgttggaaaccggaatatcttcacataaaacgtagatagaggcattctcagaaactttttttgtgatatgtagattcaactcacagcgttgaacctttctttgggtggagcagttttgaaaacctcttttatcgaatctgcaggtagacatttggggtgctttgagggctgtggtgcaaaaggaaatgtcttcccatagaaactagactgaagcattctcagcaacttctttttgacgtttgcattcatctcacagtgttgaacatacctttccatagagtagttttgaagcactatttttgtagaatctgcaagtggatatttggactgctttgagaccttcatcggaaacgggaatatcttcacataaacactagacagaagcattctcggaaattactttgtggtctgtccattcaaatcacagagttgaaccttcctttttatggagcagttttgaaacactgttttcggagaatctgcaagtggatatttggagcgctttgaggcctatggtagaaaaagaaatatctgcctatgacaactagacagaagcattccgagaaacttctttgtgatgtttgcattcaactagcagagttgaacctttcttttgatagggcagtttggaaaaactctttttgtagaatctgcatgtggatatctggagcggtttgaggcctacagtcaaaaaggaaatatcttcctgggaaaaatagacgaaagcattctcagaaactgctttgtgatatgtgcattcgactcaccgagttgaaactttttttggatagagcagttttgaaacactctgtagaatctgaaagtggatatttggagctctttgagggctatggagaaaagaaaatatattcacattaaactagacagcagcattcccagaaacttctttaggatgtttgcagtaaactcacagagttgaacacacctttccgtagagcagttttgaaacactctgtttgtggaatccgcaagtggatatttggaccgctttgagacctttgctggaaacgggaatatcttcacatataaactggacagaagaattctcagaaacttcttcgtgatgtgtgcattctactcccaaatttgaatcttccttttcatgaagcagttttgaaacactctatttgtgcattctacaattggatgattggaacgctttgatgcccatggtgggaaaaggaaatatcctcatataaaaactagacagaaggattcacagaaaatgctttgtgatgtgtgcattcaaatcacggagttgaatctttcttttgttagagcagttttgaaacactgtttctgtggaatctgccagcggacacttggagcgctttgagggctgtggtggagaaggaaatatcttcccataaaaactagaaagtagcattctcggaaacatttatgtgaagcgtgcattcaactcacagagttgaaccttccttttgatagaagagttttgaaacactcttttgaacaattgcaggtgaatctttggagcgctttgaagcctttgttggaaatgggaatatcttcacacacaaactagccagaagcattctcagaaacttctttgtgatgtgtgcgttgaacccagagagatgaacctttcctttgatagagcagttttgaaacgtgtttttgtaagatcggcaagcggataactggcttcgctttgggtcctttggtggaaacgggaatatcttctaataaaaactagacaaaaatattctcagaatcttctttgtgatgtgggcattcaactaacacagttgaacgtttcttttcacagagcagttttgaaacactcttttggtagaatctgccagtggatatttggagcgctttgagggctattgtgccaatggaaatatctgcccttaaaactagacagaagcattctcagaaactgctttgtgatgtttgcattccactcacagagttgaacataccttttcatagagcagttttgaaaacctctttttgtagaatctgcaagtggatattcggaccagtttgaggccttcataggaatcagtaatatcttcacataaaaactagatagaagcattgtcagaaagttgttggtgatgtgtgaattcaactcacagagttgaaccttcctttaatagagcagttttgaaacactctttttctagaatctgcaagtagatatttggagcgctttgaggccttcgttggaaaccggaatatcttcacaggaaaagtagatagaggcattctcagaaaattttcgtgatatgtggattcaactcacagcgttgaacctttcttttgatagagcagttttgtaaaactcttttatcgaatctgcaagtagacatttggagtgctttgagggctgtggtgcaaaaggaaatgtcttcccatagaaactagactgaagcattctcagcaacttctttgtgacgtttgcattcatctcacagtgttgaacatacctttccatagagtagttttcaaacactatttttgtagaatctgcaagtggatatttggactgctttgaggccttcatcggaaacgggaatatcttcacatcaacactagagagaagcattctcagaaactactttgtgatctgtccattcaactcacagagttgaaccttcctttttatggagcagttttgaaacaatgtttttggagaatctgcaagtggatatttggagcgctttgaggcctatggtagaaaaagaaatatctgcctctaaaaactagacagaagcattctgagaaacttctttgtgatgtttgcattcaactagcagagttgaaccttccttttgatagggcagtttggaaacacccttttgtagaatctgcatgtggatatctggagcgatttgaggcctacggtcaaaaaggaaatatcttcctgggaaaaatagacgaaagcattctcagtaaactgctttgtgatatgtgcattcgactctccgagttgaaacttttttttgatagagcagttttgaaacactctgtagaatctgaaagtggatatttggagctcttcgagggctatggcggaaaagaaaatatattcacattaaactagacagcagcattctcagaaacctctttaggatgtttgcagtaaactcacagagttgaacatacctttccgtagagcagttttgaaacactctgtttgtgggatccgcaagtggatatttggaccgctttgagacctttgctggaaatgggaatatcttcacatataaactagacagaagcattctcagaaacttcttcatgatgtgtgcattctactcccaaatttgaatcttccttttcatgaagcagttttgaaacactctgtttgtgcaatccacaattggataattggaacgctttgatgcccatggtagaaaaggaaatatcctcatataaaaactagacagaaggattcacagaaaatgctttgtgatgtgtgcattcaaatcacggagttgaatctttcttttgtcagagcagttttgaaacactgtttctgtggaatctgccagcggacacttggagcgctttgagggctatggtggagaaggaaatgtcttcccataaaaactagaaagaagcattctcagaaacatttatgtgaagcgtgcattcaactcacagagttgaaccttccttttgatagaagagttttgaaacactcttttgaacaattgcaggtgaatatttggagcgctttgaagcctttgttggaaatgggaatatcttcacacacaaactagccagaagcattctcagaaacttctttgtgatgtgtgcattgaacccagagagatgaacctttcctttgatagagcagttttgaaacgtgtttttgtaagatctgcaagcggatagttggcttcgctttgtgtcctttggtggaaacgggaatatcttctaataaaaactagacagagatattctcagcaaacttctttgtgatgtgggcattcaactgacacagttgaacatttcttttcacagagcagttttgaaacactcttttggtcgaatctgccagtggatatttggagcgctttgagggctattgtgccaatggaaatatctgcccctaaaaactagacagaagcattctcagaaactacttcgtgatgtttgcattcaactcacagagttgaacatacctcttcacagagcagtattgaaaacctctttttgtagaatctgcaagtggatattcggagcactttgaggccttcataggaaacagtaatatcttcgcataaaaactagatagaagcattgtcagaaagttctttgtgatgtgtgaattcaactcacagagttgaaccttcctttaatagagcagttttgaaacactctttttctagaatctgcaagtagatatttggagcgcttggaggccttcgttggaaaccggaacatcttcacaggaaatgtagatagaggcattctcagaaactttttcgtgatatgtggattcaactcacagcgttgaacctttcttttgatagagcagttttgtaaaactcttttatcgaatctgcaagtagacatttggagtgcgttgaaggctgtggtgcaaaaggaaatgtcttcccatagaaactagactgaagcattctcagcaacttctttgtgacgtttgccttcatctcacagtgttgagcatacctttccatagagttgttttgaagcactatttttgtagaatctgcaagtggatatttggactactttgaggccttcatcggaaacgggaatatcttcacataaacactagacagaagcattctcagaaacttctttgtcatctgtccattcaactcacagagttgaaccttcctttttatggagcagttttgaatcactgtttttggggaatctgcaagtggatatttcgagcgctttgaggcctatggtagaaaaagaaatatctgcctctaaaaaccagacagaagcattctgagaaacttctttgtgatgtttgcattcaactagcagagttgaaccttccttttgatagggcagtttggaaacactctttttgtagaatctgcatgtggttatctggagcggttttaggcctacggtcaaaaaggaaatatcttcctgggaaaaatagacgaaagcattctcagaaactgctttgtgatatgtgcattcgactcaccgagttgaaactttgttttgatagagcagttttgaaacactctgtagaatctgaaagtggatatttggagctctttgagggctatggcggaaaagaaaatatattcacattaaactagacagcagcattcccagaaacttctttaggatgtttgcagtaaactcacagtagttgaacatacctttccgtagagcagttttgaaacactctgtttgtgggatccgcaagtggatatttggaccgctttgagacctttgctggaaacgggaatatcttcacatataaactagacagaaacattctcagaaacttcttcgtgatgtgtgcattctactcccgaatttgaatcttccttttcatgaagcagtttagaaacactctgtttgtgcaatccacaattggataattggaacgctttgatgcccatggtagaaaaggaaatatcctcatataaaaactagacagaaggattcacagaaaatgctttgtgatgtgtgcattcaaatcacggagttgaatctttcttttgttagagcagttttgaaacactgtttctgtggaatctgccagcggacacttggagcactttgagggctatggtggagaaggaaatatcttcccataaaaactagaaagaagcattctcagaaccatttatgtgaagcgtgcgttcaactcacagagttgaaccttccttttgatagaacagttttgaaacactcttttgaacaattgcaggtgaatatttggagggctttgaagcctttgttggaaatgggaatatcttcacacacaaactagacagaagcattctcagaaacttctttgtgatgtgtgcgttgaacccagggagatgaacctttcctttgatagagcagttttgaaacgtgtttttgtaagatctgcaagcggataatttgtctcgctttgtgtcctttggtggaaacgggaatatcttctaataaaaactagacagaaatattctcagaatcttctttgtgatgtgggcattcaactaacacagttgaacctttcttttcacagagcagtttggaaacacccttttggtagaatctgccagtggatatttggagcgctttgagggctattgtgccaacggaaatatctgcccctaaaaactagacagaagcatgctcagaaactgctttgtgatgttggcattcaactcacagagttgaacatacctcttcatagagcagttttgaaaacctctttttgtagaatctgcaagtggatattcggaccactttgaggccttcataggaaacagtaatatcttcacataaaaactagatagaagcattgtcagaaagttctttgtgatgtgtgaattcaactcacagagttgaaccttcctttaatagagcagttttgaaacactcttcttctagaatctgtaagtagatatttggagcgctttgaggccttcgttggaaaccgaaatatcttcacagaaaaagtagatagaggcattctcagaaacttttttgtgatatgttgattccactcacagcgttgaacctttcttttgatagagcagttttgaaaaactcttttatcgaatctgcaggtagacatttggtgtgctttgagggctgtggtgcaaaaggaaatgtcttcccatagaaactagactgaaacattctcagcaacttctttgtgacgtttgcattcatctcacagcgttgaacatacctttccaaagagtagttttgaaacactatttttgtagaatctgcaagtggatatttggactgctttgaggccttcatcggaaacgggaatatcttcacataaacactagagagaagcattctcagaaacttctttgtgatctgtccattcaactcacagagttgaaccttcctttttatggaacagttttgaaacactccttttggagaatctgcaagtggatatttggagcgctttgaggcctatggtagaaaaagaaatatctgcctctaaaaaccagacagaagcattccgagaaacttctttgtgatgtttgcattcaactagcagagttgaaccttccttttcatagggcagtttggaaacactctttttgtagaatctgcatgtggatatctggagcggtttgaggcctacggtcaaaaaggaaatatcttcctgggaaaaatagacgaaagcattctcagaaactgctttgtgatatgggcattcgactcaccgagttgaaacttttttttgatagagcagttttgaaacactctgtagagatctgaaagtggatatttggagctctttgagggctatggcggaaaagaaaatatattcacattaaactagagaggagcattcccagaaacttctttaggatgtttgcagtaaactcacagagttgaacatacctttccgtagagcagttttgaaacactctgtttgtgggatccgcaagtgtatatttggaccgctttgagacctttgctggaaacgggaatatcttcacatataaactagacagaagcattctcagaaacttcttcgtgatgtgtgcattctcctcgcgaatttgaatcttccttttcatgaagcagttttgaaacactctgtttgtgcaatccacaattggataattggaacgctttgatgcccatggtagaaaaggaaatatcctcatataaaaactagacagaaggattcacagaaaatgctttgtgatgtgtgcattcaaatcacggagttgaatctttcttttgttagagcagttttgaaacactgtttctgtggaatctgccagcggacacttggagcactttgagggctgtggtggagaaggaaatatcttcccataaaaactagaaagaagcattctcagaaacatttatgtgaagcgtgcattcaactcacagagttgaaccttccttttgatacaacagttttgaaacacccttttgaacaattgcaggtgaatctatggagcgctttgaagcctttgttggaaatgggaatatcttcacacacaaactagccagaagcattctcagaaacttctttgtgatgtgtgcgttgaacccagagaggtgaacctttcctttgatagagcagttttgaaacgtgttttggtaagatctgcaaacggataattgacttcgctttgtgtattttggtggaaacgggaatatcttctaataaaaactagacagaaatattctcagaatctcctttgtgatgtgggcattcaactaacacagttgaacatttcttttcacagagcagttttgtaacacacttttggtagaatctgccagtggatattttgagcgctttgagggctgttgtgccaatggaaatatctgcccctaaaatctagacagaagcattctcagaaactgcttcgggatgtttgcattcaactcacagagttgaacatacctctgcatagagcagttttgaaaacctctttttgtagaatctgcaagtggatattcggaccactttgaggccttcatgggaaacagtaatatcttaacataaaaactagatagaagcattgtcagaaagttctttgtgatgtgtgaattcaactcacagagttgaaccttccttcaatagagcagttttgaaacactctttttctagaatctgcaagtagatatttggagtgcttggaggccttcgttggaaaccggaatatcttcacaggaaaagtagatagaggcattgtcagaaacttttttgtgatatgtagattcaactcacagcgttgaacctttctttggatggagcagttttgaaaaacccttttatcgaatctgcaggtagacattcggggtgctttgagggctgtggtgcaaaaggaaatgtcttcccatagaaactagactgaagcattctcagcaacttctttgtgatgtttgcattcatctcacagtgttgaacatacctttgcatagagtagttttgaaacactatttttgtagaatctgcaagtggatatttggactgctttgaggccttcatcggaaacgggaatatcttcacataaacactggacagaagcattctcagaaacttctttgtgatctgtccgttcaacacacagagttgaaccttcctttttatggagcagttttgaaacactgtttgtggagaatctgcaagtggatatttggagcgccttgaggccaatggtagaaaaagaaatatctgcctctaaatactagactgaagcattctgagaaacttctttgtgatgtttgccttcaactaccagagttgaaccttccttttgatagggcagtttggaaacactctttttgtagaatctgcatgtggatatctggagcgatttgaggcctacggtccaaaaggaaatatcttcctgtgaaagatagacgaaagcattctcagaaagtactttgtgatatgcgcattcgactcaccgagttgaaacttttttttgatagagcagttttgaaacactctgtagaatctgaaagtggatatttggagctctttgagggctatggcggaaaagaaaatatattcacattaaagtagacagcagcattctcagaaacttctttaggatgtttgcagtaaactcacagagttgaacatacctttccgtagagcagttttgaaacactctgtttgtgggatccgcaagtggatatttggaccgctttgagacctttgctggaaatggggatatcttcacgtataaactagacagaagcattctcagaaacttcttcgtgatgtgtgcattgtactcccaaatttgaatcttccttctcatggagcagttttgaaacactctgtttgtgcaatctacaattggagaattggaacgcttggatgaccgtggtagaaaaggaaatatcctcatataaaaactagacagaaggattcacagaaaatgctttgtgatgtgtacattcaaatcacggagttgaatctttcttttgtcagagcagttttgaaacactgtttctgtggaatctgccagcggacacttggagcgctttgagggctatggtggagaaggaaatatcttcccataaaaactagagagaagcattctcagaaacatttatgtgaagcttgcattcaactcacagagttgaaccttccctttgatacaacagttttgaaacacccttttgaacaattgcaggtgaatctttggagcgctttgaagcctttgttggaaatgggaatatcttcacacacaaactagccagaagcattctcagaaacttctttgtgatgtgtgcgttgaacccagagagatgaacctttcctttgatagagcagttttgaaacgtgtttttgtaaggtcggcaagtggataattggcttcgctttgtgtcctttggtggaaacgggaatatcttctaataaaaactagacagaaatattctcagaatctcctttgtgatgtgggcattcaactaacacagttgaacatttcttttcacagagcagttttgaaacactcttttggtcgaatctgccagtggatatttggagcgcttggagggctattgtgccaatggaaatatctgcccccgaaaactagacagaagcattctcagaaactgcttcgtgatgtttgcattcaactcacagggttgaacatacctctgcatagagcagttttgaaaacctctttttgtagaatctgcaagtggatattcggaccactttgaggccttcataggaaacagtaatatcttcacataaaaactagacagaagcattgtcagaaagttctttgtgatgtgtgaattcaactcacagagttgaaccttcctttaatagagcagttttgaaacactctttttctagaatctgccagtagatatttggagcgctttgaggccttcgttggaaaccagaatatcttcacataaaaagtagatagatgcattctcagaaactttttcgtgatatgtagattcaactcacagcgttgagcctttcttttgatagagcagtttcgtaaaactcttttatcgaatctgcaggtagacatttggagtgctttgagggctgtggtgcaaaaggaaatgtcttcccatagaaactagactgaagcattctcagcaacttcttggtgacgtttgcattcatctcacagtgttgaacatacctttccctagagtggttttaaaacactgtttttgtagaatcggcaagtggatatttggactgctttgaggccttcatcggaaaagggaatatcttcacataaacactagagagaagcattctcagaaacttctttgtcatctgtccattcaactcacagagttgaaccttcctttttatggagcagttttgaaacactccttttggagaatctgcaggtggatatttggagtgctttgaggcctatggtagaaaaagaaatatctgcctctaaaaaaaagacagaagcattccgagaaacttctttgtgatgtttgcattcaactcgcagagttgaaccttccttttgatagggcagtttggaaacactctttttgtagaatctgcatgtggatatctggagcggtttgaggcctacggtcaaaaaggaaatatcttcctgggaaaaatagacgaaagcattctcagaaagtgctttgtgatatgcgcattcgactcaccgagttgaaacttttttttgatacagcagttttgaaacactctgtagaatctgaaagtggatatttggagctctttgagggctatggcggaaaagaaaatatattcacgttaaaaaagtagacagcagcattcccagaaacttctttaggatgtttgctgtaaactcacagagttgaacatacctttccgtagagcagttttgaaacactctgtttgtgggatccgcaagtggatatttggaccgctttgagacctttgctggaaacgggaatatcttcacatataaactagacagaagcattctcagaaacttcttcgtgatgtgtgcattctactcccaaatttgaatcttccttctcatgaagcagttttataactctctatttgtgcaatttacaattggataattggaaccctttgatgcccatggtagaaaaggaaatatcctcatataaaaactagacagaaggattcacagaaaatgctttgtgatgtgtgcattcaaatcacggagttgaatctttcttttgttagagcagttttgaaacactgcttctgtggaatctgccagcggacacttggagcgctttgagggctatggtggagaaggaaatatcttcacataaaaactagaaagaagcattctcagaaccatttatgtgaagcgtgcattcaactcacagagttgaaccttccttttgatagaacagttttgaaacactcttttgaacaattgcaggtgaatatttggagggctttgaagcctttgttggaaatgggaatatcttcacacacaaactagccagaagcattctcagaaacttctttgtgatgtgtgcgttgaacccagagagatgaacctttcctttgataaagcagttttgaaacgcgtttttgtaagatcggcaagcggataattggcttcgctttgtgtcctttggtggaaacgggaatatcttctaataaaaactagacagagatattctcagaaatttctttgtgatgtgggcattcatctaacacagtcgaagatttcttttcacagagcagttttgaaatactcttttggtcgaatctgccagtggatatttggagcgctttgagggctattgtgccaatggaaatatctgcccctaaaaactagacagaagcattctcagaaactacttcatgatgtttgcattcaactcagagagttgaacatacctcttcacagagcagttttgaaaacctctttttgtagaatctgcaagtggatattcggagcactttgaggccttcataggaaacagtaatatacttcgcataaaaactagatagaagtattgtcagaaagttctttgtgatgtgtgaattcaactcacagagttgaaccttccttcaatagagcagttgtgaaacactctttttctagaatctgcaagtagatacttggagcgctttgaggccttcgttggaaaccggaatatcttcacaggaaaagtagatagaggcattctcagaaacttttttgtgatatgtagattcaactcacagcgttgaacctttctttggatggagcagttttgaaaaactcttttatcgaatctgcaggtagacattcggcgtgctttgagggctgtggtgcaaaaggaaatgtcttcccatagaaactagactgaagcattctcagcaacttcttggtgacgtttgcatttatctcacagtgttgaacatacctttccatagagtggttttgaaacactgtttttgtagaatcggcaattggatatttggactgctttgaggccttcatcggaaacgggaatatcttcacataaacactagagagaagcattctcagaaacttctttgtgatctgtccattcaactcacagagttgaaccttcctttttatggagcagttttgaaacactccttttggagaatctgcaagtggatatttggagcgctttgaggcctatggtagaaaaagaaatatctgcctctaaaaaccagacagaagcattctgagaaacttctttgtgatgtttggcattcaactaccagagttgaaccttccttttgatagggcagtttggaaacactctttttgtagaatctgcatgtggatatctggagcgatttgaggcctacggtccaaaaggaaatatcttcctgggaaaaatagacgaaagcattctcagaaagtgctttgtgatatgtgcattcgactcaccgagttgaaacttttttttgatagagcagttttgaaacactctgtagaatctgaaagtggatagttggagctctttgagggctatggcggaaaagaaaatatattcacattaaagtagacagcagcattctcagaaacttctttaggatgtttgcagtaaactcacagagttgaacctacctttccgtagagcagttttgaaacactctgtttgtgggatccgcaaggggatatttggaccgctttgagacctttgctggaaatgggaatatcttcacatataaactagacagaagcattctcagaagcttcttcgtgatgtgtgcattctactcccaaatttgaatcttccttttcatgaagcagttttgaaacactctgtttgtgcaatccacaattggataattggaacgctttgatgcccatggtagaaaaggaaatatcctcatataaaaactagacagaaggattcacagaaaatgctttgtgatgtgtgcattcaaatcacgcagttgaatctttcttttgttagagcagttttgaaacactgtttctgtggaatctgccagcggacacttggagcgctttgagggctatggtggagaaggaaatatcttcacataaaaactagaaagaaagcattctcagaaccatttatgtgaagcgtgcattcaactctcagtagttgaaccttccttttgttagaacagttttgaaacactcttttgaacaattgcaggtgaatatttggagcgctttgaagcctttgctggaaatgggaatatcttcacgcacaaagtagccagagcattctcagaaacttctttgtgatgtgtgcgttgaacccagagagatgaacctttcctttgatagagcagttttgaaacgtgtttttgtaagatctgcaagcggataattggcttctctttgtgtcctttggtggaaacgggaatatcttctaataaaaactagacagaaatattctcagaatctcctttgtgatgtgggcattcaactaacacagttgaacatttcttttcacagagcagttttgaaacacccttttggtagaatctgccagtggatatttggagcgcttggagggctattgtgccaatggaaatatctgcccctgaaaactagacagaagcattctcagaaactgcttcgtgatgtttgcattcaactcacagacttgaacatacctctgcatagagcacttttggaaacctctttttgtagaatctgcaagtggatattcggaacactctgaggccttcataggaaacagtaatatcttcacataaaaactagataaaagcattgtcagaaagttctttgtgatgtgtgaattcaactcacagagttgaaccttcctttaatagagcagttttgaaacactctttttctagaatctgcaagtagatatttggagcgctttgaggccttcgttggaaaccagaatatcttcacaggaaaagtagatagaggcattctcagaaaacttttttgtgatatgtagattcaactcacagcgttgaacctttctttggatggagcagttttgaaaaactcttttatcgaatctgcaggtagacattcggggtgctttgagggctgtggtgcaaaaggaaatgtcttcccatagaaactagactgaagcattctcagcaacttctttgtgatgtttgcattcatctcacagtgttgaacatacctttccatagggtagctttgaagcactatttttgtagaatctgcaagtggatatttggactgctttgaggccttcatcggaaacgggaatatcttcacataaacactagacagaagcattctcagaaacttctttgtcatctgtccattcaactcacagagttgaaccttccttattctggagcagttttgaaacactctttttggagaatctgcaagtggatatttggagcgctttgaggcctatggtagaaaaagaaatatctgcccctaaacaccagacagaagcattctgagaaacttctttgtgatgtttgcattcaactaccagatttgaaccttccttttgatagggcagtttggaaacactctttttgtagaatctgcatgtggacatctggagcgatttgaggcctacggtcaaaaaggaaatatcttcctgggaaaaatagacgaaagcattctcagaaagtgctgtgtgatatgtgcattcgactccccgagttgaaacttttttttgatagagcagttttgaaacactctgtagaatctgaaagtggatatttggagctctttgagggctatggcggaaaagaaaatatattcacattaaagtagacagcagcattcccagaaacttctttaggatgtttttcaagttaaactcacagagttgaacatacctttccgtagagcagttttgaaacactctgtttgtgggatccgcaagtggatatttggacccctttgagacctttgctggaaacgggaatatcttcacatataaactagacagaagcattctcagtaaacttcttcgtgatgtgtgcattctactcccgaatttgaatcttccttttcatgaagcagttttgaaacactctgtttgtgcaatccacaattggataaatggaacgctttgatgcccatggtagaaaaggaaatatcctcatataaaaactagacagaaggattcacagaaaatgctttgtgatgtgtgcattcaaatcacggagttgaatctttcttttgtgagagcagttttgaaacactgtttctttggaatctgccagcggactcttggagctctttgagggctatggtggagaaggaaatatcttcccataaaaactagaaagaagcattctcagaaccatttatgtgaagcgtgcgttcaactcacagagttgaaccttccttttgatagaacagttttgaaacactcttttgaacaattgcaggtgaatatttggagggctttgaagcctttgttggaaatgggaatatcttcacacacgaactagccagaagcattctcagaaacttctttgtgatgtgtgcgttgaacccagagagatgaacctttcctttgatagagcagttttgaaacgtgtttttgtaaggtctgcaagcggataatgggcttcgctttgtgtcctttggtggaaacgggaatatcttctaataaaaactagacagaaatattctcacaatcatctttgtgatgtgggcattcaactaacacagttgaacatttcttttcacagagcagttttgaaacactcttttgctagaatctgccagtggatacttggagcgctttgagggctattgtgccaatggagatatcttcccctaaaaactagacagaagcattctcagaaactactttgtgatgtttgcattcaactcacagagttgaacatacctcttcatagagcagttttgaaatcctctttttgtagaatctgcaagtggatattcagaccactttaaggccttcataggaaacagtaataccttcacgtaaaaactagatagaagcattgtcagaaagttctttgtgatgtgtgaattcaactcacagagttgaaccttcctttaatagagcagttttgaaacactcttcttctagaatctgcaagtagatatttggagcgctttgaggcctttgttggaaaccggaatatcttcacagaaaaagtagatagaggcattctcagaaacttttttgtgatatgtagattcaactcacaacgttgaacctttcttttgatagagcagttttgaaaaactcttttatcgaatctgcccgtagaccttttgagtgctttgagggctgtggtgcaaaaggaaatgtcttcccatagaaactagactgaagcattgtcagcaacttcttggtgacgtttgcattcatctcacagcgttgaacatacctttccatagagtggttttgaaacactgtttttgtagaatcggcaagtggatatttggactgctttgaggccttcatcggaaacgggaatatcttcacataaacactagagagaagcattctcagaaacttctttgtgatctgtccattcaactcacagagttgaaccttcctttttatggagcagttttgaaacactgttcttggagaatctgcacgtggatatttggagcgctttgaggcctgtggtagaaaaagaaatatctgcctctaaaaactagacagaagcattctgagaaacttctttgtgatgtttgcattcaagtaccagagttgaaccttccttttgatagggcagtttggaaacactctttttgtagaatctgcatgtggatatctggagcgatttgaggcctacggtcaaaaaggaaatatcttcctgggaaaaatagacgaaagcattctcagaaactgctttgtgatatgcgcattcgactcaccgagttgaaacttttttttgatagagcagttttgaaacactctgtagaatctgaaagtggatatttggagctctttgagggctatggcggaaaagaaaatatattcacattaaagtagacagcagcattcccagaaacttctttaggatgtttgcagtaaactcacagagttgaacatacctttccgtagagcagttttgaaacactctgtttttgggatccgcaagtggatatttggaccactttgagacctttgctggaaacgggaatatcttcacatataaactagacagaagcattctcagaaacttcttcatgatgtgtgcattctaatcccaaatttgaatcttccttttcatgaagcagttttgaaacactctatttgtgcattctacaattggatgattggaacgctttgatgcccatggtagaaaaggaaatatcctcatataaaaactagacagaaggattcacagaaaatgctttgtgatgtgtgcattcaaatcacggagttgaatctttcttttgtgagagcagttttgaaacactgtttctgtggaatctgccagcggacacttggttcgctttgagggctatggtggagaaggaaatatcttcccataaaaactagaaagaagcattctcagaaacatttatgtgaagcgtgcattcaactcacagagttgaaccttccttttgatacaacagttttgaaacactcttttgaacaattgcaggtgaatctttggagcgctttgaagcctttgttggaaaagggaatatcttcacacacaaactagccagaagcattctcagaaacttctttgtgatgtgtgcgttgaacccagagagatgaacctttcctttgatagagcagtattgaaacgtgtttttgtaagatctgcaagcggatagttggcttcgctttgtgtcctttggtggaaacgggaatatcttctaataaaaactagacagaaatattctcagaatcttctttgtgatgtgggcattcaactaacacagttgaacgtttcttttcacagagcagttttgaaacactcttttggtagaatctgccagtggatatttggagcgctatgagggctcttgtgccaacggaaatatctgcccctaaaaactagacagaagcattctcagaaactgctttgtgatgtttgcattcaactcacagagttgaacataccttttcatagagcagttttgaaaacctctttttgtagaatctgcaagaggatattcggaccactttgaggccttcataggaaacagtaatatcttcacgtaaaaactagatagaagcattgtcagaaagttctttgtgatgtgtgaattcaactcacagagttgaaccttcctttaatagagcagttttgaaacactctttttctagaatctgcaagtagatatttggagcgctttgaggccatcgttggaaactggaatatcttcacataaaaagtagacagaggcattctcagaaacttttttgtgatatgtagattcaactcacagtgttgaacctttctttggatggagcagttttgaaaaacccttttatcgaatctgcaggtagacatttggggtgctttgagggctgtggtgcaaaaggaaatgtcttcccatagaaactagactgaagcattctcagcaacttctgtgtgacgtttgcattcatctcacagtgttgaacatacctttccatagagtagttttgaaacactgtttttgtagaatcggcaagtggatatttggactgctttgaggccttcatcggaaacgggaatatcttcacataaacactagagagaagcattctcagaaacttctttgtggtctgtccattcaactcacagagttgaaccttcctttttatggagcagttttgaaacactgtttttggaggatctgcaagtggatatttggagcgctttgaggcctacggtagaaaaagaactatctgcctatgacaactagacagaagcattctgagaaacttctttgtgatgtttgcattcaactaccagagttgaaccttccttttgatagggcagtttggaaacactctttttgtagaatctgcatgtggatatctggagcgatttgaggcctacggtccaaaaggaaatatcttcctgggaaaaatagaggaaagcattctcagaaactgctttgtgatatgtgcattcgactcaacgagttgaaacttttttttgatagagcagttttgaaacactctgtagaatctgaaagtggatatttggagctctttgagggctatggcggaaaagaaaacatattcacattaaactggacagcagcatactcagaaacttctttaggatgtttgcagtaaactcacagagttgaacatacctttccgtagagcagttttgaaacactctgtttgtgggatccgcaagtggatatttggaccgctttgagacctttgctggaaatgggaatatcttcacatataaactagacagaagcattctaagaaacttcttcttgatgtgtgcattctactcccgaatttgaatcttccttctcatgaagcagttttgaaacactctatttgcgcaatctactattggataattggaacgctttgatgcccatggtagaaaagaaaatatcctcatataaaaactagacagaaggattcacagaaaatgctttgtgatgtgtgcattcaaatcacggagttgaatctttcttttgttagagcagttttgaaacactgtttctgtggaatctgccagcggacacttggagcgctttgagggctacgatggagaaggaaatatcttcacataaaaactagaaagaagcattctcagaaacatttatgtgaagcgtgcattcaactcacagagttgaaccttcctttggatacaacagttttgaaacactcttttgaacaattgcaggtgaatctttggagcgctttgaagcctttgttggaaatgggaatatcttcacacacaaactagccagaagcattctcagaaacttctttgtgatgtgtgagttgaacccagagagatgaacctttccttggatagagcagttttgaaacgtgtttttgtaagatctgcaagtggataattggcttcgctttgtgtcctttggtggaaacgggaatatcttctaataaaaactagacagaaatattctcagaatctcctttgtgatgtgggcattcaactaacacagttgaacatttcttttcacagagcagttttgaaacactcttttggtagaatctgccagtggatatttggagcgctttgagggctgttgtgccaatggaaatatctgcccctgaaatctagacagaagcattctcagaaactacttcgtgatgtttgcattcaactcagagagttgaacatacctcttcacagagcagttttgaaaacctctttttgtagaatctgcaagtggatattcggagcactttgaggccttcataggaaacagtaatatcttcgcataaaaactagatagaagcattgtcagaaagttctttgtgatgtgtgaattcaactcacagagttgaaccttcctttaatagagcagttttgaaacactctttttctagaatctgcaagtagatatttggagcgctttgaggccatcgttggaaaccggaatatcttcacataaaaagtagacagaggcattgtcagaaacttttttggtgatatgtagattcaactcacagcgttgaacctttctttggatggagcagttttgaaaaacccttttatcgaatctgcaggtagacattcggggtgctttgagggctgtggtgcaaaaggaaatgtcttcccatagaaactagactgaagcattctcagcaacttcttggtgacgtttgcattcatctcacagtgttgaacatacctttccatagagtggttttgaaacactgtttttgtagaatcggcaagtggatatttggactgctttcaggccttcatcggaaacgggaatatcttcacataaacaccagagagaagcatcctcagaaacttctttgtcatctgtccattcaactcacagatttgaaccttcctttttctgcagcagttttgaaacactgtttttggagaatctgcaagtggatatttggagcgatttgaggcctatggtagaaaaagaaatatctgcctctaaaaaccagacagaagcattccgagaaacttctttgtgatgtttgcattcaactagcagagttgaaccttccttttgatagggcagtttggaaacactctttttgtagaatctgcatgtggatatactggagtggtttgaggcctacggtcaaaaaggaaatatcttcctgggaaaaatagacgaaagcattctcagaaactgctttgtgatatgtgcattcgactcaccgatttgaaacttttttttgatagagcagttttgaaacactctgtagaatctgaaagtggatatttggagctctttgagggctatggcggaaaagaaaatatattcacattaaactacacagcagcattctcagaaacttctttaggatgtttgcagtaaactcacagagttgaacctacctttccatagagcagttttgaaacactctgtttgtgggatccgcaggtggatatttggaccgctttgaggcctttgctggaaatgggaatatcttcacatataaactagacagaagcattctcagaaacttcctcgtgatgtgtgcattctactcccgaatttgaatcttccttttcctgaagcagttttgaaacactctgtttgtgcaatccacaattggataattggaacgctttgatgcccatggtagaaaaggaaatatcctcatatgaaaactagacagaaggattcacagaaaatgctttgtgatgtgtgcattcaaatcacggagttgaatctttcttttgacagagcagttttgaaacactgtttctgtggaatctgccagcggacacttggagcgctttgagggctacggtggagaaggaaatatcttcccataaaaactagaaagaagtattctcagaaccatttatgtgaagcgtgcgttcaactcacagagttgaaccttccttttgatagaacagttttgaaacactcttttgaacaattgcaggtgaatatttggagggctttgaagcctttgttggaaatgggaatatcttcacacacaaactagccagaagcattctcagaaacttctttgtaatgtgtgcgttgaacccagagagatgaacctttccttcgatagagcagttttgaaacgtgtttttgtaagatcggcaagcggataattggcttcgctttgtgtcctttggtggaaacgggaatatcttctaataaaaactagacagaaatattctcagaatcttctttgtgatgtgggcattcaactaacacatttgaacatttcttttcacagagcagttttgaaacactcttttggtggaatctgccagtggatatttggagcgctttgagggcgattgtgcctatggaaatatctgcccctaaaaactagacagaagcattctcagaaactgcttcgtgatgtttgcattcaactcacagggttgaacatacctctgcatagagcagttttgaaaacctctttttgtagaatctgcaagtggatattcggaccactttgaggccttcataggaaatagtaatatcttcacataaaaattagatagaagcattgtcagaaagttctttgtgatgtgtgaattcaactcacagagttgaaccttcctttaatagagcagttttgaaacactctttttctagaatctgcaagtagatatttggagcgctttgaggccttctttggaaaccggaatatcttcacaggaaaagtagatagaggcattctcagaaacttttttgtgatatgtagattcaactcacagcgttgaacctttctttggatggagcagttttgaaaaacccttttatcgaatctgcaggtggacatttggggtgctttgagggctgtggtgcaaaaggaaatgtcttcccatagaaactagactgaagcattctcagccacttatttgtgacgtttgcattcatctcacagtgttgaacatacctttccatagagtagttttgaagcactatttttgtagaatctgcaagtggatatttggactgctttgaggccttcatcggaaacgggaataccttcacataaacactagacagaagcattctcagaaacctctttgtggtctgtccattcaactcacagagttgaaccttcctttttatggagcagtattgaaacacagtttttggagaatctgcaagtggatatttggagcgctttgaggcctatggtagaaaaagaaatatctgcctatgacaactagacagaagcattctgagaaacttctttgtgatgggtgcatgcaactacaagagttgaaccttccttttgatagggcagtttggaaacactctttttgtagaatctgcatgtggatatctggagcgatttgaggcctatggtcaaaaaggaaatattttcctgggaaaaatagacgaaagcattctcagaaactgctttgtgacatgtgcattcgactcaccgtgttgaaactgtttttcgatagagcagttttgaaacactctgtagaatctgaaagtggatatttggagctctttgagggctatggcggaaaagaaaatatattcacattaaactagacagcagcattctcagagacttctttaggatgtttgcagtaaactcacagaagttgaacatacctttccgtaaagcagttttgaaaccctctgtttgtgggatctgcaagtggatatttggaccgctttgagacctttgctggaaatgggaatatcttcacatataaactagacagaagcattctcagaaacttcttcgtgatgtgtgcattctcctcccaaatttgaatcttccttttcatgaagcagttttgaaacactccgtttgtgtaatctacaattggataactggaaggctttgatgcccatggtagaaaaggaaataacctcatataaaaactagacagaaggattcacagaaaatgctttgtgatgtgtgcattcaaatcacggagttgaatctttcttttgttagagcagttttgaaacactgtttctgtggaatctgccagcggacacttggagcgctttgagggctatggtggagaaggaaataacttcccataaaaactagaaagaagcattctcagaaccatttatgtgaagcgtgcattcaactcacagagttgaaccttccttttgatagaacagttttgaaacactcttttgaacaattgcaggtgaatatttggagggctttgaagcctttgttggaaacgggaatatcttcacacacgaactagccagaagcattcccagaaacttctttgtgatgtgtgcgttgaacccagagagatgaacctttctttgatagagcagttttgaaacgtgtttttgtaagatcggcaagcggataattggcttcgctttgtgtcctttggtggaaacgggaatatcttctaataaaaactagacagaaatattctcagaatctcctttgtgatgtgggcattcaactaacacagttgaacatttcttttgacacagcagttttgaaacacacttttggtagaatctgccagtggatatttggagcgcttggagggctattgtgccaatggaaatatctgcccctgaaatctggacagaagcattctcagaaactgcttcgtgatgtttgcattcaactcacagagttgaacatacgtgtgcatagagcagttttgaaaacctctttttgtagaatctgcaagtggatattcggaccactttgaggccttcataggaaacagtaatatcttcacataaaaactagatagaagcattctcagaaagttctttgtgatgtgtaaattcaactcacagagttgaaccttcgtttaatagagcagttttgaaacactctttttctagaatctgcaagtagatatttggagcgctttgaggccttcgttggaaaccggaatatcttcacacaaaaagtagatagaggcatgctcagaaacttttttgtcatatgtagattcaactcacagcgttgaacctttcttttgatagagcagttttgaaaaactcttttatcgaatctgcaagtagacatttggagtgctttgagggcttctggtgcaaaaggaaatgtcttcccatagaaactagactgaaagcattctcagcaacttcttggtgacgtttgcattcatctcacagttttgaacatacctttccatagagtggttttgaaacactgtttttgtataatcggcaagtggatatttggactgctttcaggccttcatcggaaacgggaatatcttcacataaacactagagagaagcattctcagaaacttctttgtggtctgtccattcaactcacagagttgaaccttcctttttatggagcagttttgaaaccctgtttttggagaatctgcaagtggatatttggagcgctttgaggcctatggtagaaaaagaaatatctgcctatgacaactagacagaagcattctgagaaacttctttgtgatgtttgccttcaactaccggagttgaaccttccttttgatagggcagtttggaaacactctttttgtagaatctgcatgtggatatctggagcgatttgaggcctacggtccaaaaggaaatatcttcctgggaaagatagacgaaagcattctcagcaactgctttgtgatatgtgcattcgactcaccgagttgaaacttttttttgatagagcagttttgaaacactctgtagaatctgaaagtggatatttggagatctttgagggctatggcggaaaagaaagtatattcacattaaagtagacagcagcattccaagaaacttccttaggatgtttgcagtaaactcacagagttgagcattcctttccgtagagcagttttgaaacactctgtttgtgggatccgcaagtggacatttggaccgctttgagacctttgctggaaatgggaatatcttcacatataaactggacagaagcattctcagaaacttcttcatgatgtgtgcattctcctcgcgaatttgaatcttccttttcatgaagcagttttgaaacactctgtttgtgcaatccacaattggataattggaacgctttgatgcccatggtagaaaaggaaatatcctcatataaaaactagacagaaggattcacagaaaatgctttgtgatgtgtgcattcaaatcacggagttcaatctttcttttgttagagcagttttgaaacactgtttctgtggaatctgccatcggacacttggagcgctttgagggctgtggtggagaaggaaatatcttcccataaaaactagaaagaagcattctcataaacatttatgtgaagcgtgcattcaactcacagagttgaaccttcgttttgatagaacagtttggaaacactcttttgaacaattgcaggtgaatctttggagcgctttgaagcctttgttggaaatgggaatatcttcacacacaaactagccagaagcattctcagaaagttctttgtgatgtgtgcgttgaacccagagagatgaacctttccttggatagagcagttttgaaacgtgtttttgtaagatctgcaagtggataattggcttcgctttgtgtcctttggtggaaacgggaatatcttctaataaaaactagacagaaatattctcagaatctcctttgtgatgtgggcattcaactaacacagttgaacatttcttttcacagagcagttttgaaacactcttttgggagaatctgccagtggatatttggagcgcttggagggctattgtgccaatggaaatatctgcccctgaaaactagacagaagctttctcagaaactacatagtgatgttcgcattcgactcacagagttgaacatacctcttcatagagcagtttttaaaaccttttttgtagaacctgaaagtggatattcggaccactttgaagccttcataggaaacagtaatatcttcacataaaacctagatagaagcattgtcagaaacttctttgtgatgtgtgaattcaactcacagagttgaaccttcctttaatagagcagttgtgaaacactctttttctagaatctgcaagtagatatttggagcgctttgaggccttcgttggaaaccggaatatcttcacaggaaaagtagatagaggcattctcagaaacttgttttgtgatatgtagattcaactcacagcgttgaacctttctttggatggagcagttttgaaaacctcttttatcgaatctgcaggtaaacatttggggtgctttgagggctgcggtgcaaaaggaaatgtcttcccatagaaactagactgaagcattctcagcaacttcttcgtgaggtttgcattcatttcacagtgttgagcatacctttccacagagtagttttgaaacactatttttgtagaatttgcaactggatatttggactgctttgaggccttcatcggaaacgggaatatcttcacataaacactagacagaagcattctcagaaacttctttgtgatctgtccattcaactcacagagttgaaccttcctttttatggagcagctttgaaacactgtttttggagaatctgcaagtggatattcggagcggtttgaggcctatggtagaaaaagaaacatctgcctctaaaaactagactgaagcattctgagaaacttctttgtgatgtttgcattcaactaccagagttgaaccttccttttgattgcgcagtttggaaacactctttttgtagaatctgcatgtggatatctggagcgatttgaggcctacggtcaaaaaggaaatatcttcctgggaaaaatagacgaaatcattctcagaaactactttgtgttatgagcattcaactcacagagttgaaccttttttttgatagagcagttttgaaacactctgtagaatctgaaagtggatatttggagctctttgagggctatggtggaaaagaaaatatattcacattaaactagacagcagcattctcagtaacttctttaggatgtttgcagtaaactcacagagttgaacataactttccgtagagcagttttgaaacactctgtttgtgggatccgcaaggggatatttggaccgctttgagacctttgctggaaatgggaatatcttcacatataaactagacagaagcattctcagaaacttcttcgtgatgtgtgcattctactcccaaatttgaaacttccttttcatgaagcagttttgaaacactctatttgtgcattctacaattggatgattggaacgctttgatgcccatggtagaaaaggaaatatcctcatataaaaactagacagaaggattcacaaaaaatgctttgtgatgtgtgcattcaaatcacggagttgaatctttcttttgttagagcagttttgaaacactgtttctgtggaatctgccagcggacacttggagcgctttgagggctgtggtggagaaggaaatatcttcccataaaaactagaaagaagcattctcagaaacatttatgtgaagcgtgctttcaactcacagagttgaaccttccttttgatacaacagttttgaaacacccttttgaacaattgcaggtgaatctttggagcgctttgaagcctttgttggaaatgggaatatcttcacacacaaactagccagaagcattctcagaaacttctttgtgatgtgtgcgttgaacccagagagatgaacctttccttggatagagcacttttgaaacgtgtttttgtaagatctgcaagcggataattggcttcgctttgtgtcctttggtggaaacgggaatatcttctaataaaaactagacagaaatattctcagaatctcctttgtgatgtgggcattcaactaacacagttgaacatttcttttcacagagcagttttgagacactcttttggtagaatctgccagtggatatttggagcgctttgagggctgttgtgccaatggaaatatctgcccctaaaatctagacagaagcattctcagaaactacttcgtgatgtttgcattcaacacacagagttgaacatacctcttcacagagcagttttgaaaacctctttctgtagaatctgcaagtgatattcggaccactttgaggccttcataggaaacagtaatatcttcacataaaaactagatagaagcattgtcagaaagttctttgtgatgtgtgaattgaaatcacagagttgaaccttcctttaatagagcagttttgaaacactctttttctagaatctgcaagtagatatttggagagctttgaggccttcgttggaaaccggaatatcttcacataaaaagtagatagaggcattctcagaaacttttttgtgatatgtagattcaactcacagcgttgaacctttctttggatggagcagttttgaaaaactcttttatcgaatctgcaggtagacatttggggtgctttgagggctgtggcgcaaagggaaatgtcttcccatagaaactagactgaagcattctcagcaacttctttgtgacgtttgcattcatctcacagtgttgaacatacctttccatagagtagttttgaaacactgtttttgtagaatcggccagtggatatttggactgctttgaggccttcatcggaaacgggaatatcttcacataaacactagagagaagcattctcagaaacttctttgtcatctgtccattcaactcacagagttgaaccttcctttttatggagcagttttgaaacactccttttggagaatctgcaagtggatatttggagcgctttgaggcctatggtagaaaaaggaatatctgcctctgaaaaccagacagaagcattccgagaaacttctttgtgatgtttgcattcaactagcagaggtgaaccttccttttgatagggcagtttggaaacactctttttgtagaatctgcatgtggatatcttgagcggtttgaggcctacggtcaaaaaggaaatatcttcctgggaaaaatagacgaaagcattctcagaaagggctttgtgatatgcgcattcgactcaccgagttgaaacttttttttgatacagcagttttgaaacactctgtagaacctgaaagtggatatttggaactctttgagggctatgacggaaaagaaaatatattcacattaaagtagacagcagcattctcagaaacttctttaggatgtttgcagtaaactcacagagttgaacatacctttccgaagagcagttttgaaacactctgtttgtgggatccgcaagtggatatttggaccgctttgagacctttgctggaaatgggaatatcttcacatataaactagacagaagcattctcaaaaacttcttcgtgatgtgtgcattctactcccaaatttgaatcttccttttcatgaagcagttttgaaacactctatttctgcaatctacaattggataattggaacgctttgatgcccaaggtagaaaaggaaatatcctcatataaaaacttgacagaaggattcacagaaaatgctttgtgatgtgtgcattcaaatcacggggttgaatctttcttttgttagagccgttttgaaacactgtttctgtggaatctgccagcggacacttggagcgctttgagggccatggtggagaaggaaatatctttccataaaaactaaaaagaagcattctcagaaacatttatgtgaagcgtgtattcaactcacagagttgaaccttccttttgatagaacagttttgaaacactcttttgaacaattgcaggtgaatctttggagcgctttgaagcctttgttggaaatgggaatatcttcacacacaaactagccagaagcattctgagaaacttctttgtgatgtgtgcgttgaacccagagagatgaacgtttcctttgatagagcagttttgaaacgtgtttttttaagatctgcaagcggataattggcttcgctttgtgtcctttggtggaaacgggaatatcttctaataaaaactagacagaaatattctcagaatctcctttgtgatgtgggcatttaactaacacagttgaacatttcttttcacagagcagttttgagacactcttttggtagaatctgccagtggatatttggagcgctttgagggctgttgtgccaatggaaatatctgcccctaaaatctagacagaagcattctcagaaactacttcgtgatgtttgcattcaacacacagagttgaacatacctcttcacagagcagttttgaaaacctctttctgtagaatctgcaagtggatattcggaccactttgaggtcatcataggaaacagtaatatcttcacataaaaactagatagaagcattgtcagaaagtactttgtgatgtgtgaattcaactcacagagttgaaccttcctttaatagagcagttgtgaaacactctttttctagaatctgcaagtagatatttggagcgctttgaggccttcgttggaaaccggaatatcttcacaggaaaattagatagaggcattctcagaaacttttttgtgatatgtagattcaactcacagtgttgaacctttctttggatggagcagttttgaaaaactcttttatcgaatctgcaggtagacatttggggtgctttgagggctctggtgcaaaaggaaaagtcttcccatagaaactagactgaagcattctcagcaacttcttggtgacgtttgcattcatctcacagtgttgaacatacctctccatagagtggttttgaaacactgtttttgtagtatcggcaagtggatatttggactgctttgaggccttcatcggaaacgggaatatcttcacataaacactagagagaagcattctcagaaacttctttgtcatctgtccattcaactcacagagttgaaccttcctttttatggagcagatttgaaacactccttttggagaatctgcaagtggatatttggagcgctttgaggcctatggtagaaaaagaaatatctgcttctaaaaaccagacagaagcattccgagaaacttctctgtgatgtttgcattcaagtagcagagttgaaccttccttttgatagggcagtttggaaacactctttttgtagaatctgcatgtggatatctggagcggtttgaggcctacggtcaaaaaggaaatatcttcctgggaaaaatagacgaaagcattctcagaaagggctttgtgatatgcgcattcgactcaccgagttgaaacttttttttgatacagcagttttgtaacactctgtagaatctgaaagtggatatttggagctctttgagggctatggcggaaaagaaaatatattcacattaaagttgacagcagcattctcagaaacttctttaggatgtttgcagtaaactcaaggaattgaacatacctttccgtagagcagttttgaaacactctgtttgtgggatccgcaagtggatatttggacagctttgagacctttgctggaaatgggaaaatcttcacatataaactagacagaagcattctcagaaacttcttcgtgatgtgtgcattctcctcccgaatttgaatcttccttttcctgaagcagttttgaaacactctgtttgtgcaatccacaattggataattggaacgctttgatgcccatggtagaaaaggaaatatcctcatataaaaactagacagaaggattcacagaaaatgctttgtgatgtgtgcattcaaatcacggaggtgaatctttgttttgttagagcagttttgaaacactgtttctgtggaatctgccagcggacacttggagcgctttgagggctatggtggagaaggaaatgtcttcacataaaaactagaaagaagcattctcagaaacatgtatgtgaagcgtgcattcaactcacagagttgaaccttccttttgatacaacagttttgaaacactcttttgaacaattgcaggtgaatctttggagcgctttgaagcctttgttggaaatgggaatatcttcacacacaaactagccagaagcattctcagaaacttctttgtgatgtgtgcgttgaacccagagagatgaacctttcctttgatagagcagttttgaaacgtgtttttgtaagatctgcaaggggataatgggcttcgctttgtgtcctttggtggaaacgggaatatcttctaataaaaactagacagaaaatattctcagtatctcctttgtgatgtgggcattcaactaacacagttgaacatttcttttcacagagcagttttgaaacactcttttggtagaatctgccagtggatatttggagcgcttggagggctattgtgccaatggaaatatctgcccctgaaaactagacagaagcattctcagaaactacttcgtcatgtctgcattcaacacacagagttgaacatacctcttcacagagcagttttgaaaacctctttctgtagaatctgcaagtggatattcggaccactttgaggccttcataggaaacagtaatatcttcacataaaaactagatagaggcattctcagaaagttttttgtgatatgtagattcaactcacagcattgaacctttctttggatggagcagttttgaaaaacccttttatcgaatctgcaggtagacatttggggtgctttgagggctgtggtgcaaaaggaaatgtcttcccatagaaactagactgaaagcattctcagcaacttctttgtgacgtttgcattcatctcacagtgttgaacatacctttccatagagtagttttgagacactatttttgtagaatctgcaagtggatatttggactgctttgaggccttcatcggagacgggaatatcttcacataaacactaggcagaagcattctcagaaactactttgtgatctgtccattcaactcacagagttgaaccttcctttttatggagcagttttgaaacactgtttttggagaatctgcaagtggatatttggagcgctttgaggcttatggtagaaaaagaaatatctgcctctaaaaactagacagaagcattctgagaaacttctttgtgatgtttgcattcaactaccagagttgaatcttccttttgatagggcagtttggaaacactctttttgtagaatctgcatgtggatatctggagcgatttgaggcctatggtcaaaaaggaaatatcttgcctgggaaaaatagacgaaagcattctcagaaactgcttcgtgatatgtgcattcgactcaccgagttgaaacttttttttgatagagcagttttgaaacaccctgtagaatctgaaagtggatatttggagctctttgagggctatggcggaaaagaaaagatattcacattaagctagacagcagcattctcagaaacctctttaggatgtttgcagtaaactcacagagttgaacatacctttccttagagcagttttgaaacactctgtttgtgggatccgcaagtggatatttggaccgctttgagacctttgctggaaatgggaatatcttcacatataaactagacagaagcattctcagaaacttcttcgtgatgtgtgcattctcctcccgaatttgaatcttccttttcatgaagcagttttgaaacactctgtttgtgcaatccacaattggataattggaacgctttgatgcccatggtagaaaaggaaatatcctcatataaaaattagacagaaggattcacagaaaatgctttgtgatgtgtgcattcagatcacggagttgaatctttcttttgttagagcagttttgaaacaccgtttctgtggaatctgccagcggacacttggagcgctttgagggctatggtggagaaggaaatatcttcacataaaaactagaaagaagcattctcagaaacatttatgtgaagcgtgcattcaactcacagagttgaaccttcgttttgatagaacagttttgaaacactcttttgaacaattacaggtgaatctttggagcgctttgaagcctttgttggaaatgggaatatcttcacacacaaactagccagaagcattctcagaaacttctttgtgatgtgtgcgttgaacccagagagatgaacctttccttggatagagcagttttgaaacgtgtttttgtaagatctgcaagcggataattggcttcgctttgtgtcctttggtggaaacaggaatatcttctaataaaagctagacagaaatattctcagaatctcctttgtgatgtgggcattcaactaacacaattgaacatttcttttcacagagcagttttgaaacacagttttggtagaatctgccagtggatatttggagcacttggagggctactgtgccaatggaaatatctgcccctgaaaattagacagaagcattctcagaaactacattctgatgtttgcattcgactcacagagttgaacatacctcttcatagagccgttttgaaaaccttttttgtagaatctgaaagtggatattcggaccactttgaggccttcataggaaacagtaatatcttcacataaaaactagatagaagcattgtcagaaagttcttggtgatgtgtgaattcaactcacagagttgaaccttcctttaatagagcagttttgaaacactctttttctagaatctgcaagtagatacttggagcgctttgaggccttcgttggaaaccggaatatcttcacaggaaaagtagatagaggcattctcagaaacttttttgtgatatgtagattcaactcacagcgttgaacctttcttttgatagagcagttttgaaaaactcttttatcgaatctgcaagtagacatttggagtgctttgagggctgtggtgcaaaaggaaatgtcttcccatagaaactagactgaagcattctcagcaacttctttgtgacgtttgcattcatctcacagggttgaacatacctttgcatagagtagttttgaaacactgtttttgtagaatctgcaagtggatatttggactgctttgaggccttcatcggaaacgggaatatcttcacataaacactagacagaagcattctcagaaacttctttgtgatctgtccattcaactcacagagttgaaccttcctttttatggagcagttttgaatcactgtttttggagaatctgcaagtggatatttcgagcgctttgaggcctatggtagaaaaagaaatatctgcctctaaaaaccagacagaagcattccgagaaacttctctgtgatgtttgcattgaactagcagagttgaaccttccttttgatagggcagtttggaaacactctttttgtagaatctgcatgtggatatctggagcggtttgaggcctacggtcaaaaaggaaatatcttcctgggaaaaatagacgaaatcattctcagaaactactttgtgttatgtgcattcaactcacagagttgaaccttttttttgatagagcagttttgaaacactctgtagaatctgaaagtggatatttggagctctttgagggctatggtggaaaagaaaatatattcacattaaactagacagaagcattctcagtaacttctttaggatgtttgcagtaaactcacagagttgaacatacctttccgtagagcagttttgaaacactctgtttgtgggatccgcaaggggatatttggaccgctttgagacctttgctggaaatgggaatatcttcacatataaactagacagaagcattctcagaaacttcttcgtgatgtgtgcattctcctcccaaatttgaatcttccttttcatgaagcagttttgaaacactctgtttgtgcaatccacaattggataattggaacgctttgatgcccatggtagaaaaggaaatatcctcatataaaaactagacagaaggattcacagaaaatgctttgtgatgtgtgcattcaaatcatggagttgaatctttcttttgtcagagcagttttgaaacactgtttctgtggaatctgccagcgaacacttggagcgctttgagggctatggtggagaaggaaatatcttcccataaaaactagaaagaagcattctcagaaacatttatgtgaagcatgcattcaactcacagagttgaaccttccttttgatagaacagttttgaaacactcttttgaacaattgcaggtgaatctttggagcgctttgaagcctttgttggaaatgggaatatcttcacacacaaactagccagaagcattctcagaaacttctttgtgatgtgtgcgttgaacccagcagagatgaacctttccttggatagagcagttttgaaacgtgtttttgtaagatctgcaagcggataattggcttcgctttgtgtcctttggtggaaacgggaatatcttctaataaaaactagacagaaatattctcagaatcttctttgtgatgtgggcattcaactaacacagttgaacatttcttttcacagagcagttttgaaacactcttttggtagaatctgccagtggatatttggagcgctttgaagactattgtgccaatggaaatatctgcccctaaaaactagacagaagcattctcagaaactacttcgtgatgtttgcattcaacacacagagttgaacatacctcttcacagagcagttttgaaaacctctttctgtagaatctgcaagtggatattcggaccactttgaggccttcataggaaacagtaatatcttcacataaaaactacatagaagcattgtcagaaagttctttgtgatgtgtgaattcaactcacagagttgaaccttcctttaatagagcagttttgaaacactctttttctagaatctgcaagtagatatttggagcgctttgaggccttcgatggaaaccggaatatcttcacaggaaaagtagatagaggcattctcacgaaacttttttgtgatatgtagattcaactcacagcgttgaacctttctttggatggagcagttttgaaaaactcttttatcgaatctgcaggtagacatttggggtgctttgagggctgtggtgcaaaaggaaatgtcttccaatagaaactagactgaagcattctcagcaacttctttgtgacgtttgcattcatctcacagtgttgaacatacctttccatcgagtacttttgaaacactgtttttgtagaatctgcaagtggatatttggactgctttgaggccttcatcggaaacgggaatatcttcacataaacactagagagaagcattctcagaaacttctttgtggtctgtccattcaactcacagtgttgaaccttcctttttatggagcagttttgaaaccctgtttttggagaatctgcaagtggatatttggagcgctttgaggcctatggtagaaaaagaaatatctgcctatgacaactagacagaagcattctgagaaacttctttgtgatgtttgcattcaactagcagagttgaaccttccttttgatagggcagtttggaaacactctttttgtagaatctgcatgtggatatctggagcggtttgaggcctacggtcaaaaaggaaatatcttcctgggaaaaatagacgaaagcattctcagaaagtgctttgtgatatgtgcattcgactcaccgagttgaaacttttttttgatagagcagttttgaaacactctgtagaatctgaaagtggatatttggagctctttgagggctatggcagaaaagaaaatatattcacattaaagtagacagcagcattctcagaaacttctttaggatgtttgcagtaaactcacagagttgaacatacctttccaaagagcagttttgaaacactctgtttgtgggatccgcaagtggatatttgggccgctttgagacctttgctggaaatgggaatatcttcacatataaactacacagaagcattctcagaaacttcttcgtgatgtgtgcattctactcccaaatttgaatcttccttctcatgaagcagttttgaaacactctgtttgtgcaatctacaattggataattggaacgctttgatgcccatggtagaaaaggaaatatcctcatataaaaactagacagaaggattcacagaaaatgctttgtgatgtgtgcattcaaatcacggtgttgaatcttattttgttagagcagttttgaaacactgtttctgtggaatctgcccgcggacacttggagcgctttgagggctgtggtggagaagggaatatcttcccataaaaactagaaagaagcattctcagaaacatttatgtgaagcgtgcattcaactcacagagttgaaccttccttttgatacaacagttttgaaacactctttggaacaattgcaggtgaatctttggagcgctttgaagcctttgttggaaatgggaatatcttcacacacaaactagccagaagcattctcagaaaattctttgtgatgtgtgcgttgaacccagagagatgaacctttcctttgatagagcagttttgaagcgtgtttttgtaagatcggcaagcggataattggcttcgctttgtgtcctttggtggaaacgggaatatcttctaataaaaactagacagaaatattctcagaatcttctttgtgatgtgggcattcaactaacacagttgaacctttcttttcacagagcagttttgaaacaaccttttggtagaatctgccagtggatatttggagcgctttgagggctattgtgccaacggaaatatctgcccctaaaaactagacagaagcattctctgaaactactttgtgatgtttgcattcaactcacagagttgaacatacctcttcatagagcagttttgaaaacctctttttgtagaatctgcaagtggatattcggaccactttgaggccttcataggaaacagtaataccttcacataaaaactagatagaagcatagtcagaaagttctttgtgatgtgtgaattcaaatcacagagttgaaccttcctttaatagagcagttttgaaacactctttttctagaatctgcaagtagatatttggagcgctttgaggccttcgttggaaaccggaatatcctcacataaaaagcagatagaggcattctcagaaactttttcgtgatatgtggattcaactcacagcgttgaacctttcttttgatagagcagttttgtaaaactcttttatcgaatctgcaagtagacatttggagtgctttgagggttgtggtgcaaaaggaaatgtcttcccataggaactagactgaagcattctcagcaacttcttggtgacgtttgcattcatctcacagtgttgaacatacctttccatagagtggttttgaaacactgtttctgtagaatcggcaagtggatatttggactgctttgaggccttcatcggaaatgggaatatcttcacataaacactagagagaagcattctcagaaacttctttgtgatctgtccattcaactcacagagttgaaccttcctttttatggagcagttttgaaacactctttttggagaatctgcaagtggatatttggagcgctttgaggcctatggtagaaaaagaaatatctgcctctaaaaaccagacagaagcattccgagaaacttctctgtgatgtttgcattcaactagcagagttgaaccttccttttgatagggcagtttggaaacactcttttgtagaatctgcatgtggatatctggagcggtttgaggcctacggtcaaaaaggcaatatcttcctgggaaaaatagacgaaagcattctcagaaactgctttgtgatatgtgcattccagtcaccgagttgaaacttttttttgatagagcagttttgaaacactctgtagaatctgaaagtggatatttggatctctttgagggctatggcggaaaagaaaatatattcacattaaagtagacagcagcattcccagaaacttctttaggatgtttgcagtaaactcacagagttgaacatacctttccgtagagcagttttgaaacactctgtttgtgggatccgcaagtggatatttggaccgctttgagacctttgctggaaacgggaatatcttcacatatcaactagacagaagcattctcagaaacttcttcgtgatgtgtgcattctactcccgaatttgaatcttccttttcatgaagcagttttgaaacactctgtttgtgcaatccacaagtggataattggaacgctttgatgcccatggtagaaaaggaaatatcctcatataaaaattagacagaaggattcacagaaaatgctttgtgatgtgtgcattcgaatcacggagttgaatctttcttttgttagagcagttttgaaacacagtttctgtggaatctgccagcggacacttggagcgctttgaggtctatggtggagaaggaaatatcttcccataaaaactagaaagaagcattctcagaaccatttatgtgaagcgtgcattcaactcacagagttgaaccttccttttgatagaacagttttgaaacactcttttgaacaattgcaggtgaatatttggagggctttgaagcctttgttggaaacgggaatattcttcacacacgaactagccagaagcattctcagaaacttctttgtgatgtgtgcgttgaacccagagagatgaacctttcctttgatagagcagttttgaaacgtgtttttgtaagatctgcaagcggataattggcttcgcattgtgtcctttggtggaaacgggaatatcttctaataaaaactagacagagatattctcagaaacttctttgtgatgtgggcattcaactaacacagttgaacatttcttttcacagagcagttttgaaacactcttttggtcgaatctgccagtggatatttggagcgctttgagggctattgtgccaatggaaatatctgcccctaaaaactagacagaagcattctcagaaactacttcgtgatgtttgcattcaacacacagagttgaacatacctcttcacagagcagttttgaaaacctctttctgtagaatctgcaagtggatatttggaccactttgaggccttcttaggaaacagtaatatcttcacataaaaactagatagaagcattgtcagaaagttctttgtgatgtgtgaattcaactcacagaattgaaccttcctttaatagagcagttttgaaacactctttttctagaatctgccagtagatatttggagcgctttgaggccttcgttggaaaccggaatatcttcacataaaacgtagatagaggcattctcagaaactttttcgtgatatgtggattcaactcacagcgttgaacctttcttttgatagagcagttttgtaaaactcttttatcgaatctgcaagtagacatttagagtgctttgagggctgtggtgcaaaaggaaatgtcttcccatagaaactagactgaagcattctcagcaacttctttgtgacgtttgcattcatctcacagtgttgaacatacctttccatacagtagttttgaagcactatttttgtagaatctccaagtggatatttggactgctttgaggccttcatcggaaacgggaatatcttcacataaacactagacagaagcattctcagaaacttctttgtgatctgtccattcaactcacagagttgaaccttcctttttatggagcagttttgaaacactgtttttggagaatcttcaagtagatatttggagcgctttgtggcctatggtagaaaaagaaatatctgcctataacaactagacagaggcattctcagaaacttctttgtgatgtttgcattcaactcacagagttgaacatacctcttcatagagcagttttgaaaacctctttttgtagaatctgcaagtggatatttggaccactttgaggccttcatagaaaacagtaatatcttcacataaaaactagatggaagcattctcagaaactgctttgtgatatgtgcattcgactcaccgagttgaaactttttttggatagagcacttttgaaacactctgtagaatctgaaagtggatatttggagctctttgagggctatggcggaaaagaaaagatattcacattaaactagacagcagcattcccagaaacttctttaggatgtttgcagtaaactcacagagttgaacatacctttccgtagagcagttttgaaacactctgtttgtgggatccgcaagtggatatttggacccctttgagacctttgctggaaacgggaatatcttcacacataaactagacagaagcattctcagaaacttcttcgtgatttgtgcattgtactcccaaatttgaatcttccttcccaaggagcagttttgaaacactctgtttgtgcaatctacaattggagaattggaacgcttggatgcccgtggtagaaaaggaaatatcctcatataaaaactagacagaaggattcacagaaaatgctttgtgatgtgtgcattcagatcacggagttgaatctttcttttgttagagcagttttgaaacactgtttctgtggaatctgtcagcagacacttggagtgctttgagggctatggtggagaaggaaatatcttcacataaaaactagaaagaagcattctcagaaacatttatgtgaagcttgcattcaactcacagagttgaaccttccctttgatacaacagttttgaaacacccttttgaacaattgcaggtgaatctttggagcgctttgaagcctttgttggaaatgggaatatcttcacacacaaactagccagaagcattctcagaaacttctcgtgatgtgtgcgttgaacccagagagatgaacctttcctatgatagagcagttttgaaacgtgtttttgtaagatctgcaagcggataattggcttcgctttgtgtcctttggtggaaacgggaatatcttctaataaaaactagacagagatattctcagaaacttctttgtgatgtgggcattcaactaacacagttgaacattgcttttcacagagcagttttgaaacactcttttggtcgaatctgccagtggatatttggagcgctttgagggctattgtgccaatggaaatatctgcccctaaaaactagacagaagcattctcagaaactgctttgtgatgtttgcattcaactcacagagttgaacatacctcttcatagagcagttttgaaaacctctttttgtagaatctgcaagtggatatttggaccactttgaggccttcatagatacagtaatatcttcacataaaaactagatggaagcattgtcagaaagttctttgtgatgtgtgaattcaactcacagagttgaaccttcctttaatagagcagttttgaaacactctttttctagaatctgccagtagatatttggagcgctttgaggccttcgttggaaaccggaatatcttcacataaaacgtagatagaggcattctcagaaactttttttgtgatatgtagattcaactcacagcgttgaacctttctttggatggagcagttttgaaaaacccttttatcgaatctgcaggtagacattcggggtgctttgagggctgtggtgcaaaaggaaatgtcttcccatagaaactagactgaagcattctcagcaacttctttgtgacgtttgcattcatctcacagtgttgaacatacctttccatagagtagttttgaagcactatttttgtagaatctgcaagtggatatttggactgctttcaggccttcatcggaaacgggaatatcttcacataaacactagacagaagcattctcagaaacttctttgtggtctgtccattcaactcacagagttgaaccttcctttttatggagcagttttgaaaccctgtttttggagaatctgcaagtggatatttggagtgctttgaggcctatggtagaaaaagaaatatctgcctatgacagctagacagaagcattccgagaaacttctttgtgatgtttgcattcaactagcagagttgaaccttccttttgatagggcagtttggaaacactctttttgtagaatctgcatgtggatatctggagcggtttgaggcctacgttcaaaaaggaaatatcttcctgggaaaaatagacgaaagcattctcagaaagtgctttgtgatatgtgcattcgactcaccgagctgaaacttttttttgatagagcagttttgaaacactctgtagaatctgaaagtggatatttggagctctttgagggctatggcggaaaagaaaatatattcacattaaaaaagtagacagcagcattctcagaaacttctttaggatgtttgcagtaaactcacagagttgaacatacctttccgtagagcagttttgaaacactctgtttgtgggatccgcaagtggatatttggaccgctttgagacctttgctggaaatgggaataacttcacatataaactagacagaagcattctcagaaacttcttcgtgatgtgtgcattctactcccaaatttgaatcttccttttcatgaagcagttttgaaacactctgtttctgccatctacaattggataattggaacgctttgatgcccaaggtagaaaaggaaatatcctcatatagaaactagacagaaggattcacagaaaatgctttgtgatgtgtgcattcaaatcaccggagttgaatctttcttttgttagagcagttttgaaacactgtttctgtggaatctgccagcggacacttggagcgctttgagggctgtggtggagaaggaaatatcttcccataaaaactagaaagaagcattctcagaaacatttatgtgaagcgtgcattcaactcacagagttgaaccttccttttgatacaacagttttgaaacactcttttgtacaattgcatgtgaatctttggagcgctttgaagcctttgttggaaatgggaatatcttcacacacaaactagccagaagcattctcagaaacttctttgtgatgtgtgcgttgaacccagagagatgaacctttcctttgatagagcagttttcaaacgtgtttttgtaagatcggcaagcggataattggcttcgctttgtgtcctttggtggaaacgggaatatcttctaataaaaactagacagaaatattctcagaatctcctttgtgatgtgggcattcaactaacacagttgaacatttcttttcacagagcagttttgaaacactcttttggtagaatctgccagtggatatttggagcgatttgagggctattgtgccaatggaaatttctgcccctgaaaactagacagaagcattctcagaaactgctttgtgatgtttgcattcaactaccagagttgaacttccctcttcatagagcagttttgaaatcctctttttgtagaatctgcaagtggatatttggaccactttgaggccttcagagtaaatagtaatatcttcacataaaaactagatagaagcattctcagaaacttctttgtgatgtgtgaattcaactcacagagttgaaccttcctttaatagtgcagttttcaaacactctttttgtagaatctgcaagtagatatttggagcactttgaggccttcattggaaactggaatatcttcacataaatagtagatagaggcattctcagaaacttttttgttatatgtagattcaactcacagtgttgaagctttcttttgattgaacagttttgaagaactcttttatcgaatctgcaagtagacatttggagttctttgagggctgtagtcgaaaaggaaatatcatcacatagaaactagactgaagcattctcagcaacttcttggtgacgtttgcattcatctcacagtgttgaacatacctttccatagagtggttttgaaacactgtttttgtagaatcggcaagtggatatttggactgctttgaggccttcatcggaaacgggaatatacttcacataaacactagagagaagcattctcagaaacttctttgtcatctgtccattcaactcacagagttgaaccttcctttttctggagcagttttgaaacactccttttggagaatctgcaagtggatatttggagcgctttgaggcctatggtagaaaaagaaatatctgcctctaaaaaccagacagaagcattccaagtaaacttctctgtgttgtttgcattcaactagcagagttgaaccttccttttgatagggcagtttggaaacactctttttgtagaatctgcatgtggatatctggagcggtttgaggcctacggtcaaaaaggaaatatcttcctgggataaatagacgaaagcattctcagaaactgctttgtgatatgggcattcgactcaccgagttgaaacttttttttgatagagcagttttgaaacactctatagaatctgaaagtggatatttggagctctttgagggctatggcggaaaagaaaatatattcacattaaagtagacagcagcactcccagaaacttctttaggatgtttacagtaaactcacagagttgaacatacctttctgtagagcagttttgaaacactctgtttgcgggatccgcaagtggatatttggaccgctttgagacctttgctggaaatgggaatatcttcacatatgaactagacagaagcattctcagaaacttcttcgtgatgtgtgcattctactcccaaatttgaatcttccttttcatgaagcagttttgaaacactctgtttgtgcaatccacaattggataattggaaagctttgatgcccatggtagaaaaggaaatatcctcatataaaaactagacagaaggattcacagaaaattctttgtgatgtgtgcattcaaatcacggagttgaatctttcttttgttagagcagttttgaaacactgtttctgtggaatctgccagcggacacttggagcgctttgagggctatggtggagaaggaaatatcttcacataaaaactagaaagaaatattctcagaatcttctttgtgatgtgggcattcaactaacacagttgaacatttcttttcacagaacagttttgaaacactcttttgaacaattgcaggtgaatctttggaacgctttgaagcctttgttggaaataggaatatattcacacacaaactagccagaagcattctcagaaatttctttgtgatgtgtgcgttgaacccagagagatgaacctttccttcgatagagcagttttgaaacgtgtttttgtaagatcggcaagcggataattggcttcgctttgtgtcctttggtggaaacgggaatatcttctaataaaaactagacagaaatattctcagaatctcctttgtgatgtgggcattcaactaacacagttgaacatttcttttcacagagcagctttgaaacactctttggtagaatctgccggtggatatttggagcgcttggagggctattgtgccagtggagatatctgcccctgaaaactagacagaagcattctcagaaactacttcgtgatgtttgcattcaacacacagagttgaacatacctcttcacagagcagttttgaaaacctctttctgtagaatctgcaagtggatattcggaccactttgaggacttcataggaaacagtaatatcttcacataaaaactagatagaagcattgtcagaaagttctttgtgatgtgtgaattcaactcacagagttgaaccttcctttaatagagcagttttgaaacactttttttctggaatctgcaagtagatatttggagcgctttgaggccttcgttggaaaccggagtatcttcacaggaaaagtagatagaggcatgctcagaaacttttttgtcatatgtagattcaactcacagcgttgaacctttcttttgatagagcagttttgaaaaactcttttatcgaatctgcaagtagacatttggagtgctttgacggctctggtgcaaaaggaaatgtcttcccatagaaagtagactgaagcattctcagcaacttcttggtgacgtttgcattcatctcacagtgttgaacatacctttccatagagtggttttgaaacactgtttttgtagaatcggcaactggatatttggactgctttgaggccttcatcggaaacgggaatatcttcacataaacactagagagaagcattctcagaaacttctttgtcatctgtccattcaactcacagagttgaaccttcctttttatagagcagttttgaaacactccttttggagaatccgcaagtggatatttggagcgctttgaggcctatggtagaaaaagaaatatctgcctctaaaaaccagacagaagcattctgagaaacttctttgtgatgtttgcattcaactaccagagttgaaccttccttttcatagggcagtttggaaacactctttttgtagaatctgcatgtggatatctggagcgatttgaggcctacggtcaaaaaggaaatatcttcctgggaaaaatagacgaaagcattctcagaaagtgctttgtgatatgtgcattcgactcaccgagttgaaacttttttttgatagagcagttttgaaacactctgcagaatctgaaagtggatatttggagctctttgagggcttaggcggaaaagaaaatatattcacattaaagtagacagcagcattctcagagacttctttaggatgtttgcagtaaactcacagagttgaacatacctttccgtaaagcagttttgaaaccctctgtttgtgggatctgcaagtggatatttggaccgctccgagacctttgctggaaatgggaatatcttcacatataaactagacagaagcattctcagaaacttcttggtgatgtgtgcattgtactcccaaatttgaatcttccttctcatggagcagttttgaaacactctgtgcaatctacaattggagaattggaacgcttggatgcccgtggtagaaaaggaaatatcctcatataaaaactagacagaaggattcacagaaaatgctttgtgatgtgtgcattcagatcacggagttgaatctttcttttgttagagcagttttgaaacactgtttctgtggaatctgccagcggacacttggagcgcttttagggctatggtggagaaggaaatatcttcacataaaaactagaaagaagcattctcagaaccatttatgtgaagcgtgcattcaactcacagagttgaaccttccttttgatagaacagttttgaaacactcttttgaacaattgcaggtgaatatttggagggctttgaagcctttgttggaaacgggaatatcttcacacacgaactagccagaagcattctcagaaacttctttgtgatgtgtgcgttgaacccagagagatgaaccattcctttgatagagcagttttgaaacgtgtttttgtaagatctgcaagcggatagttggcttcgctttgtgtcctttggtggaaacgggaatatcttctaataaaaactagacagaaatattctcacaatctcctttgtgatgtgggcattcaactaacacagttgaacatttcttttcacagagcagttttgagacactcttttggtagaatctgtcagtggatatttggagcgctttgagggttgttgtgccaatggaaatatctgcccctaaaatctagacagaagcattctcagaaactgcttcgtgatgtttgcattcaactcacagacttgaacatacctcttcatagagcagttttgaaaacctctttttgtagaatctgcaagtggatattcggaccacattgaggccttcataggaaacagtaatatcttcacataaaaactagatagaagcattgtcagaaagttctttgtgatgtgtgaattcaactcacagatttgaaccttcctttaatagagcagttttgaaacacactttttctagaatctgcaagtagatatttggagcgctttgaggccttcgttggaaaccggaatatcttcacaggaaaagtagatagaggcattctcagaaactttttcgtgatatgtggattcaactcacagcgttgaacctttcttttgatagagcagttttgtaaaactcttttatcgaatctgcaagtagacatttggagtgctttgagggctgtggtgcaaaaggaaatgtcttcccatagaaactagactgaagcattctcagcaacttcttggtgacgtttgcattcatctcacagtgttgaacatacctttccatagagtggttttgaaacactgtttttgtagaatcggcaagtggatatttggactgctttgaggccttcatcggaaacgggaatatcttctcataaacactagagagaagcattctcagaaacttctttgtgatctgcccattcaactcacagagttgaaccttcctttttatggagcagttttgaaacactgtttttggagaatctgcaagtggatatttggagcgctttgaggcctatggtagaaaaagaaatatctgcctctaaaaactagacagaagcattccgagaaacttctttgtgatgtttgcattcaactagcagagttgaaccttccttttgatagggcagtttggaaacactctttttgtagaagctgcatgtggatatctggagcggtttgaggcctacggtcaaaaaggaaatatcttcctgggaaaaatagacgaaagcattctcagaaagtgctttgtgatatgtgcattcgactcaccgagttgaaatttttttttgatagagcagttttgaaacactctgtagaatctgaaagtggatatttggagctctttgagggctatggcggcaaagaaactatattcacattaaagtagacagcagcattctcagaaacttctttaggatgtttgcagtaaagtcacagagttgaacatacctttccgtagagcagttttgaaacactctgtttgtgggatccgcaagtggatatttggaccgctttgagacctttgctggaaatgggaatatcttcacatataaactagacagaagcattctcagaaacttcttcgtgatgtgtgcattgtactcccaaatttgaatcttccttctcatggagcagttttgaaacacactgtttgtgcaatctacaattggagaattggaacgcttggatgcccgtggtagaaaaggaaatatcctcatataaaaactagacagaaggattcacagaaaatgctttgtgatgtgtgcattcaaatcacggagttgaatctttcttttgtcagagcagttttgaaacactgtttctgtgggatctgccagcggacacttggagcgctttgagggctgtggtggagaaggaaatatcttcccataaaaactagaaagaagcattctcagaaacatttatgtgaagcgtgcattcaactcacagagttgaaccttcctttggatacaacagttttgaaacactcttttgaacaattgcaggtgaatctttggagcgctttgaagcctttgttggaaatgggaatatcttcacacacaaactaaccagaagcattctcagaaacttctttgtgatgcgtgcgttgaacccagagagatgaacctttcctttgatagagcagttttgaaacgtgtttttgtaagatctgcaagcggataattggcttcgctttgtgtcctttggtgggaacgggaatatcttctaataaaaattagacagaaatattctcagaatcttctttgtgatgtgggcattcaactaacacagttgaacatttcttttcacagaacagttttgaaacactcttttgaacaattgcaggtgaatctttggagcgctttgaagcctttgttggaaataggaatatattcacaaacaaactagccagaagcatgctcagaaactacttcgtgatgtctgcattcaacacacagagttgaacatacctcttcacagagcagttttgaaaacctctttctgtagaatctgcaagtggatattcggaccactttgaggccttcataggaaacagtaatatcttcacataaaaactagatagaaagcattgtcagaaagttctttgtgatgtgtgaattcaactcacagagttgaaccttcctttaatagagcagttttgaaacactctttttctagaatctgcaagtagatatttggagcgctttgaggccttctttggaaaccggaatatcttcacataaaaagtagatagggcattctcagaaactttttcgtgatatgtggattcaactcacagcgttgaacctttcttttgatagagcagttttgtaaaactcctttatcgaatctgcaagtagacatttggagtgctttgggggctgtggtgcaaaaggaaatgtcttcccatagaaactagactgaagcattctcagcaacttctttgtgacgtttgctttcatctcacagtgttgaacatacctttccatagagtagttttgaagcactatttttgtagaatctgcaagtggatatttggactgctttgaggccttcatcggaaacgggaatatcttcacataaacactagacagaagcattctcagaaacttctttgtggtctgtccattcaactcacagagttgaaccttcctttttatggagcagttttgaaacactgttttcggaggatctgcaagtggatatttggagcactttgaggcctacggtagaaaaagaaatatctgcctatgacaactagacagaagcattccgagaaaagttctttgtgatgtttgcattcaactagcagagttgaaccttccttttgatagggcagtttggaaacactctttttgtagaatctgcatgtggatatctggagcggtttgaggcctacagtcaaaaaggaaatatcttcctgggaaaaatagacgaaagcattctcagaaactgctttgtgatatgcgcattcgactcaccgagttgaaacttttttttgatacagcagttttgaaacactctgtagaatctgaaagtggatatttggagctctttgagggctatggcggaaaagaaaatatattcacattaaagtagacagcagcattctcagaaacttctttaggatgtttgcagtaaactcacagagttgaacatacctttccgtagagcagttttgaaacactctgtttgtgggatccgcaagtggatatttggaccgctttgagacctttgctggaaatgggaatatcttcacgtataaactagacagaagcattttcagaaacttcttcgtgatgtgtgcattctactcccaaatttgaatcttccttctcatgaagcagttttgaaacactctgtttgtgcaatccacaattggatatttggaacgctttgatgcccgttgtagaaaaggtaatatcctcatataaaaactagacagaaggattcacagaaaatgctttgtgatgtgtgcattcaaatcacggagttgaatctttcttttgttagagcagttttgaaacactctttctgtggaatctgccagcggacacttggagcgctttgagggctgtggtggagaaggaaatatcttcccataaaaactagaaagaagcatactcagaaacatttatgtgaagcgtgcattcaactcacagagttgaaccttccttttgatacaacagttttgaaacactcttttgaacaattgcaggtgaatctttggagcgctttgaagcctttgttggaaatgggaatatcttcacacacaaactagccagaagcattctcagaaacttctttgtgatgtgtgcgttgaacccagagagatgaacctttcctttgatagagcagttttgaaacgtgtttttgtaagatcggcaagcggataattggcttcgctttgtgtcctttggtggaaacgcgaatatcttctaataaaaactagacagaaatattctcagaatctcctttgtgatgtgggcattcaactaacacagttgaacatttcttttcacagagcagttttgaaacactcttttggtagaatctgccagtggatatttggagcgcttggagggctattgtgccaatggaagtatctgcccctgaaaactatacagaagcattctcagaaactacttcgtgatgtttgcattcaactcacagagttgaacatacctcttcatagagcagttttgaaaacctctttctgtagaatctgtaagtggatattcggaccactttgaggccttcataggaaacagtaatatcttcacataaaaactagatagaagcattgtcagaaagttctttgtgatgtgtgaattcaactcacagagttgaactttcctttaatagagcagttttgaaacactctttttctagaatctgcaagtagatatttggagcgctttgaggccttcgttggaatccggaatatcttcacataaaacgtagatagaggcatgctcagaaacttttttgtcatatgtagattcaactcacagcgttgaacctttcttttgatagagcagttttgaaaaactcttttatcgaatctgcaagtagacatttggagtgctttgagggctcaggtgcaaaaggaaatgtcttcccatagaaactagactgaagctttctcagcaacttcttggtgacgtttgcattcatctcacagtgttgaacatacctttccatagagtagttttgaaacactgtttttgtagaatcggcaagtggatatttggactgctttgaggccttcatcggaaacgggaatatcttcacataaacactagagagaagcattctcagaaacttctttgtcatctgtccattcaactcacagagttgaaccttcctttttatggagcagttttgaaacactccttttggagaatctgcaagtggatatttggagcgatttgaggcctatggtagaaaaagaaatatctgcctctaaaaaccagacagaagcattccgagaaacttctttgtgatgtttgcattcaactagcagagttaaaacttccttttgatagggcagtttggaaacactctttttgtagaatctgcatgtggatatctggagcggtttgaggcctacggtcaaaaaggaaatatcttcctgggaaaaatagacgaaagcattctcagaaagtgctttgtgatatgcgcattcgactcaccgagttgaaacttttttttgatagagcagttttgaaacactctgtagaatctgaaagtggatatttggagcactttgagggctatggcggaaaagaaaatatattcacattaaagtagacagcagcattctcagaaacttctttaggatgtttgcagtaaactcacagagttgaacctacctttccgtagagcagttttgaaacactctgtttgtgggatccgcaaggggatatttggaacgctttgagacctttgctggaaatgggaatatcttcacatataaactagacagaagcattctcagtaaacttcttcgtgatgtgtgcattctactcccaaatttgaatcttccttttcatgaagcagttttgaaacactctgtttgtgcaatccacaattggataattggaacgctttgatgcccatggtagaaaaggaaatatcctcatataaaaactagacagaaggattcacagaaaatgctttgtgatgtgtacattcaaatcacggagttgaatctttcttttgtcagagcagttttgaaacactgtttctgtggaatctgccagcggacacttggagcgctttgagggctgtggtggagaaggaaatatcttcccataaaaactagaaagaagcattctcagaaccatttatgtgaagcgtgcattcaactcacagagttgaaccttccttttgatagaacagttttgaaacactcttttgaacaattgcaggtgagtatttggagggctttgaagcctttgttggaaatgggaatatcttcacacacaaactagccagaagcattctcagaaacttctttgtgatgtgtgcattgaacccagagagatgaacctttcctttgatagagcagttttgaaacgtgtttttgtaagatctgcaagcggatagttggcttcgctgtgtgtcctttggtggaaacgggaatatcttctaataaaaactagacagagatattctcagaaacttctttgtgatgtgggcattcaactaacacagttgaacatatcttttcacagagaagttttgaaacactcttttggtcgaatctgccagtggatatttggagcgctttgagggctattgtgccaatggaaatatctgcccctaaaaactagacagaaacattctcagaaactgctttgtgatgtttgcattcaactcacacaggtgaacatacctcttcatagagcagttttgcaaacctctttttgtagaatctgcaagtggatattcggaccactttgaggccttcataggaaacagtaatatcttcacataaaaactagacagaagcattgtcagaaagttctttgtgatgtgtgaattcaactcacagagttgaaccttcctttaatagagcagttttgaaactctctttttgtagaatctgcaagtagatatttggagcgctttgaggccttctttggaaaccggaatatcttcacataaaaagtagatagaggcattctcagaaactttttcgtgatatgtggattcaactcacagcgttgaacctttcttttgatagagcagttttgtaaaactcttttatcgaatctgcaagtagacatttggagtgctttgggggctgtggtgcaaaaggaaatgtcttcccatagaaactagactgaagcattctcagcaacttcttggtgacgtttgcattcgtctcacagtgttgaacatacctttccatagagtggttttgaaacactgtttttgtagaatcggcaagtggatatttggactgctttgaggccttcatcggaaacgggaatatcttcacataaacactagagagaagcattctcagaaacttctttgtcatctgtccattcaactcacagagttgaaccttcctttttatggagcagttttgaaacactccttttggagaatctgcaagtggatatttggagcgctttgaggcctatggtagaaaaagaaatatccgcccctaaaaaccagacagaagcattctgagaaacttctttgtgatgtttacattcaactaccagagttgaaccttccttttgatagggcagtttggaaacactctttttgtagaatctgcatgtggatatctggagcgatttgaggcctacggtccaaaaggaaatatcttcctgggaaaaatggacgaaagcattctcagaaactgctttgtgatatgtgcattcaactcaccgagttgaaactttttttggatagagcagttttgaaacactctgtagaatctgaaagtggatatttggagctctttgagggctatggtggaaaagaaaatatattcacattaaactatacagcagcattctcagaaacatctttaggatgtttgcagtaaactcatagagttcaacatacctttccgtagagcagctttgaaacactctgtttgtgggatccgcaagtggatatttggaccgctttgagacctttgctggaaatgggaatatcttcacatataaactagacagaagcattctcagaaacttcttcgtgacgtgtgcattgtactcccaaatttgaatcttccttctcatggagcagttttgaaacactctgtttgtgcaatctacaattggagaattggaaggcttggatgcccatggtagaaaaggaaatatcctcatataaaaactagacagaaggattcacagaaaatgctttgtgatgtgtgcattcaaatcacggggttgaatctttcttttgttagagcagttttgaaacactgtttctgaggaatctgccagcggacacttggagcgctttgagggtcatggtggagaaggaaatatctttccataaaaactagaaagaagcattctcagaaacatttatgtgaagcgtgcattcaactcacagagttgaaccttccttttgatacaacagttttgaaacactcttttgaacaattgcaggtgaatcttcggagcgctttgaagcctttgttggaaatgggaatatcttcacacacaaactagccagaagcattctcagaaacatctttgtgatgtgtgcgttgaacccagagagatgaacctttcctttgatagagcagttttgaaacgtgtttttgtaaggtctgcaagcggataatgggcttcgctttgtgtcctttggtggaaacgggaatatcttctaataaaaactagacagaaatattctcagaatcttctttgtgatgtgggcattcaactaacacagttgaacgtttcttttcacagagcagttttgaaacactcttttggtagaatctgccagtggatatttggagcgctttgagggctattgtgccaacggaaatatctgcccctaaaaactagacagaagcattctcagaaactacttcgtgatgtttgcattcaacacacagagttgaacatacctcttcacagagcagttttgaaaacctctttctgtacaatctgcaagtggatattcggaccactttgaggccttcataggaaacagtaatatctttgcataaaaactagatagaagcattgtcagaaagttctttgtgatgtgtgaattcaactcacagagttgaaccttccttcaatagagcagttttgaaacactctttttccagaatctgcaagtagatatttcgagcgctttgaggccttcgttggaaaccggaatatcttcacaggaaaagtagatagaggcattctcagaaacttttttgtgatatgtagattcaactcacagcgttgaacctttttttggatggagcagttttgaaaaactcttttatcgaatctgcaggtagacatttggggtgctttgagggctgtggtgcaaaaggaaatgtcttcccatagaaactagactgaagcattctcagcaacttcttggtgacgtttgcattcatctcacagtgttgaacatacctttccatagagtggttttgaaacactgtttttgtagaatcggcaagtggatatttggactgctttcaggccttcatcacaaacgggaatatcttcacataaacactagagagaagcattctcagaaacttctttgtcatctgtccattcaactcacagagttgaaccttcctttttctggagcagttttgaaacactctttttcgagaatctgcaagtggatatttggagcgctttgaggcctatggtagaaaaagtaatatctgcctctaaaaaccagacagaagcattctgagaaacttctttgtgatgtttgccttcaactaccagagttgaaccttccttttgatagggcagtttggaaacactctttttgtagaatctgcatgtggatatctggagcgatttgaggcctacggtccaaaaggaaatatctgcctgggaaagatagacgaaagcattctcagaaagtgctttgtgatatgtgcattcgactcaccgagttgaaacttttttttgatagagcagttttgaaacactctgtagaatctgaaagtggatatttggagctctttgagggctatggcggaaaagaaaatatattcacattaaggtagacagcagcattcttagaaacttctttaggatgtttgcagtaaactcacagagttgaacctacctttccgtagagcagttttgaaacactctgtttgtgggatccgcaagtggatatttggaccgctttgagacctttgctggaaatgggaatatcttcacatataaactaggcagaagcattctcagaaacttcttcgtgatgtgtgcattctactcccaaatttgaatcttccttttcatgaagcagttttgaaacactcggtttgtgcaatccacaattggataattggaacgctttgatgcccatggtagaaaaggaaatatcctcatataaaaactagacagaaggattcacagaaaatgctttgtgatgtgtgcattcaaatcacggagttgaatctttcttttgtcagagcagttttgaaacactgtttctgtggaatctgccagcggactcttggagctctttgagggctatggtggagaaggaaatatcttcccataaaaagtagaaagaagcattctcagaaacatttatgtgaagcgtgcattcaactcacagagttgaaccttccttttgatacaacagttttgaaacactcttttgaacaattgcaggtgaatctttggagcgctttgaagcctttgttggaaatgggaatatattcacacacaaactagccagaagcattcccagaaacttctttgtgatgtgtgcgttgaacccagagagatgaacctttcctttgatagagcagttttgaaacgtgtttttgtaagatcggcaagcggataattggcttcgctttgtgtcctttggtggaaacgggaatatcttctaataaaaactagacagaaatattctcacaatctcctttgtgatgtgggcattcaactaacacagttgaacatttcttttcacagagcagttttgagacactcttttggtagaatctgccagtggatatttggagcgctttgagggctgttgtgccaatggaaatatctgcccctaaaatctagacagaagcattctcagaaactgttttgtgatgtttgcattcaactcacagaggtgaacatacctcttcatagagcagttttgcaaacctctttttgtagaatctgcaagtggatattcggaccactttgaggccttcataggaaacagtaatatcttcacataaaaactagatagaagcattgtcagaaagttctttgtgatgtgtgaattcaactcacagagttgaaccttcctttaatagagcagttttgaaacactctttttctagaatctgccagtagatatttggagcgctttgaggccttcgttggaatccggaatatcttcacataaaaagttgatagaggcattctcagaaacttttttgtgatatgtagattcaactcacagcgttgaacctttctttggatggagcagttttgacaaacccttttatcgaatctgcaggtagacatttggggtgctttgagggctgtggtgcaaaaggtaatgtcttcccatagaaactagactgaagcattctcagcaacttcttggtgacgtttgcattcatctcacaagtgttgaacatacctttccatagagtagttttgaaacactgtttttgtagaatcggcaagtggatatttggactgctttgaggccttcatcggaaacgggaatatcttcacataaacactagagagaagcattctcagaaactactttgtgatctgtccattcaactcacagagttgaaccttcctttttatggagcagttttgaaacactgtttttggagaatctgcaagtggatatttggagcgcttttaggcctatggtagaaaaagaaatatctgcctattacaactagactgaagcattctgtgaaacttctttgtgatgtttgccttcaactaccagagttgaaccttccttttgatagggcagtttggaaacactctttttgtagaatctgcatgtggatatctggagcgatttgaggcctacggtccaaaaggaaatatcttcctgggaaagatagacgaaagcattctcagaaactgctttgtgacatgtgcattcgactcaccgagttgaaactttttttggatagagcagttttgaaacactctgtagaatctgaaagtggatatttggagctctttgagggctatggcggaaaagaaaatatattcacattaaactagacagcagcattcccggaaacttctttaggatgtttgcagtaaactcacagagttgaacatacctttccgtagagcagttttgaaacactctgtttgtgggatccgcaagtggatatttggaccgctttgagacctttgctggaaacgggaatatcttcacatataaactagacagaagcattctcagaaacttcttcgtgatgtgtgcattctactcccgaatttgaatcttccttttcatgaagcagttttgaaacactctgtttgtgcaatccacaattggataaatggaacgctttgatgcccatggtagaaaaggaaatatcctcatataaaaactagacagaaggattcacagaaaatgctttgtgatgtgtgcattcaaatcacagagttgaatctttcttttgttagagcagttttgaaagactgtttctgtggaatctgccagcggacacttggagcgctttgagggctacggtggagaaggaaatatcttcacataaaaactagaaagaagcattctcagaaacatttatgtgaagcgtgcattcaactcacagagttgaaccttcctttggatacaacagttttgaaacactcttttgaacaattgcaggtgaatctttggagcgctttgaagcctttgttggaattgggaatatcttcacacacaaactagccagaaacattctcagaaacttctttgtgatgtgtgcgttgaacccagagagatgaacctttcctttgatagagcagttttgaaacgtgtttttgtaagatctgcaagcggatagttggcttcgctttgtgtcctttgttggaaacgggaatatcttctaataaaaactagacagaaatattctcagaatcttcttcgtgatgtgggcattcaactaacacagttgaacctttcttttcacagagcagtttggaaacacccttttggtagaatctgccagtggatatttggagcgctttgagggctattgtgccaacggaaatatctgcccctaaaaactagacagaagcattctcagaaactgctctgtgatgtttgcattcaactcacagagttgaacatacctcttcatagagcacttttggaaacctctttttgtagaatctgcaaggggatattcggaccactttgaggccttcataggaaacagtaatatcttcacataaaaactagatagaagcattgtcagaaagttctttgtgatgtgtgaattcaactcacagagttgaaccttccttcaatagagcagttgtgaaacactctttttctagaatctgcaagtggatacttggagcgctttgaggccttcgttggaaaccggaatatcttcacaggaaaagtagatagaggcattctcagtaaacttttttgtgatatgtagattcaactcacagcgttgaacctttctttggatggagcagttttgaaaaactcttttatcgaatctgcaggtagacatttggggtgctttgagggctgtggtgcaaaaggaaatgtcttcccatagaaactagactgaagcattctcagcaacttctttgtgacgtttgcattcatctcacagtgttgaacatacctttccatagagtagttttgaaacactgtttttgtagaatctgcaagtggatatttggactgctttgaggccttcatcggaaacgggaatatcttcacataaacactagacagaagcatcctcagaaacttctttgtcatctgtccattcaactcacagatttgaaccttcctttttctgcagcagttttgaaacactctttttggagaatctgcaagtggatatttggagcgctttgaggcctatggtagaaaaagaaatatctgcctctaaaaaccagacagaaagcattccgagaaacttctctgtgatgtttgcattcaactagcagagttgaaccttccttttgatagggcagtttggaaacactctttttgtagaatctgcatgtggatatctggagcggtttgaggcctacggtcaaaaaggaaatatcttcctgggaaaaatagacaaaagcattctcagaaactgctttgtgatatgggcattcgactcaccgagttgaaacttttttttgatagagcagttttgaaacactctgtagaatctgaaagtggatatttggagctctttgagggctatggcggaaaacaaaatatattcacattaaagtagacagcagcattcccagaaacttctttaggatgtttgcagtaaactcacagagttgaacatacctttccgtagagctgttttgaaacactctgtttgtgggatccgcaagtggatatttggaccgctttgagacctttgctggaaacgggaatatcttcacatataaactagacagaagcattctcagaaacttcttcgtgatgtgtgcattctactcccaaatttgaatcttccttttcatgaagcagttttgaaacactctatttgtgcattctacaattggatgattggaacgctttgatgcccatggtagaaaaggaaatatcctcatataaaaactaggcagaaggattcacagaaaatgctttgtgatgtgtgcattcagatcacggagttgaatctttcttttgttagagcagttttgaaacactgtttctgtggaatctgccagcggacacttggagcgctttgagggctatggtggagaaggaaatatcttcacataaaaactagaaagaagcattctcagaaccatttatgtgaagcgtgcgttcaactcacagagttgaaccttccttttgatagaacagttttgaaacactcttttgaacaattgcaggtgaatatttggagggctttgaagccttttttggaaatgggaatatcttcacacacaaactagccagaagcattctcagaaacttctttgtgatgtgtgcgttgaacccagagagatgaacctttcctttgatagagctgttttgaaacgtgtttttctaacatctgcaagcggataattggcttcgcgttgtgtcctttggtggaaacgggaatatcttctaataaaaactagacagaaatattctcagaatcttctttgtgatgtgggcattcaactaacacagttgaacgtttcttttcacagagcagttttgaaacactcttttggtagaatctgccagtggatatttggagcgctttgagggctattgtgccaatggaaaatctgcccctaaaaactagacagaagcattctcagaaactacttcgtgatgtttgcattcaactcacagagttgaacatacctcttcacagagcagttttgaaaacctctttttgtagaatctgcaagtggatattcggagcactttgaggccttcataggaaacagtaatgtcttcgcataaaaactagatagaagcattgtcagaaagttctttgtgatgtgtgaattcaactcacagagttgaaccttcctttaatagagcagttttgaaacactctttttctagaatctgcgagtagatatttggagcgctttgaggccttcgttggaaaccggaatatcttcacatagaaagtagatagaggcattctcagaaacttttttgtgatatgtagattcaactcacagcgttgaacctttctttggatggagcagttttgaaaaactcttttatcgaatctgcaggtagacatttggggtgctttgagggctgtggtgcaaaaggaattgtcttcccatagaaactagactgaagcattctcagcaacttcttggtgacgtttgcattcatctcacagtgttgaacatacgtttccatagagtggttttgaaacactgtttttgtagaatcggcaagtggatatttggactgctttgaggccttcatcggaaacgggaatatcttcacataaacactagagagaagcaatctcagaaacttctttgtgatctgtccgttcaactcacagagttgaaccttcctttttatggagcagttttgaaacactgtttgtggagaatctgcaagtggatatttggagcgccttgaggccaatggtagaaaaagaaatatctgcctctaaatactagactgaagcattccgagaaactcctttgtgatgtttgcattcaactagcagagttgaaccttccttttgatagggcagtttggaaacactctttttgtagaatctgcatgtggatatctggagcggtttgaggcctacggtcaaataggaaatatcttcctgggaaaaatagacgaaagcattctcagaaactgctttgtgatatgtgcattcgactcaccgagttgaaactattttttgatagagcagttttgaaacactctgtagaatctgaaagtggatatttggagctctttgagggctatggcggaaaagaaaatatattcacattaaagtagacagcagcattctcagaaacttctttaggatgtttgcagtaaactcagagagttgaacataccttacggtagagtagttttgaaacactctgtttgtgggatcctcaagtggatatttggaccgctttgagacctttgctggaaatgggaatatcttcacatataagctagacagaagcattctcagaaacttcttggtgatgtgtgcattgtactcccaaatttgaatcttccttctcatggagcagttttgaaacactctgtttgtgcaatctacaattggagaattggaatgcttggatgcccgtggtagaaaaggaaatatcctcatataaaaactagacagaaggattcacagaaaatgctttgtgatgtgtgcattcaaatcacggagttgaatctttctttcgttagagcagttttgaaacactgtttctgtggaatctgccagcggacacttggagcgctttgagagctatggtggagaaggaaatatcttcacataaaaactagaaagaagcattctcagaaacatttatgtgaagcgtgcattcaactcacggagttgaaccttccttttgatacaacagttttgaaacactctttggaacaattgcaggtgaatctttggagcgctttgaagcctttgttgcaaatgggaatatcttcacacacaaactagccagaagcattcccagaaacttctttgtgatgtgtgcgttgaacccagagagatgaacctttcctttgatagagcagttttgaaacgtgtttttgtaagatctgcaagcggataattggctttgctttgtgtcccttggtgaaaacgggaatatcttctaataaaaactagacagaaatattctcagaatctcctttgtgatgtgggcattcaactaacacagttgaacatttcttttcacagagcagttttgaaacactcttttggtagaatctgccagtggatatttggagcgcttggagggctattgtgccaatggaaatatctgcccctgaaaactggacagaagcattctcagaaactacttcgtgatgtttgcattcaacacacagagttgaacatacctcttcacagagcagttttgaaaacctctttctgtagaatctgcaagtggatattcggaccactttgaggccttcataggaaacagtaatatcttcacataaaaactggatagaagcattgtcaggaagttctttgtgatgtgtgaattcaactcacagagttgaaccttcctttaatagagcagttttgaaacactctttttctagaatctgcaagtagatatttggagcgcttggaggccttctttggaaaccggaatatcttcaaaggaaatgtagatagaggcattctcagaaacattttttgtgatatgtagactcaactcacagcgttgaacctttctttggatggagcagttttgaaaaactcttttatcgaatctgcaggtagacatttggggtgctttgagggctgtggtgcaaaaggaaatgtcttcccatagaaactagactgaagcattctcagcaacttctttgtgacgtttgcattcatctcacagtgttgaacatacctttccatagagtagttttgaaacactgtttttgtagaatcggcaagtggatatttggactgctttgaggccttcatcggaaacgggaatatcttcacataaacgctagagagaagcattctcagaaacttctttgtgatctgtccattcaactcacagagttgaaccttcctttttctggagcagttttgaaacactgttcttggagaatctgcaagtggatatttggagcgctttgaggcctgtggtagaaaaagaaatatctgcctctaaaaactagacagaagcattccgagaaacttctctgtgatgtttgcattcaactagcagagttgaaccttccttttgatagggcagtttggagacactctttttttagaatctgcatgtggatatctggagcggtttgaggcctacggtcaaaaaggaaatatcttcctgggaaaaatagacgaaagcattctcagaaactgctttgtgatatgtgcattcgactcaccgagttgaaacttttttttgatagagcagttttggaacactctgtagaatctgaaagtgtagatttggagctctttgagggctatggcggagaagaaaatatattcacattaaactagacagcagcattcccagaaacttctttaggatgtttgcagtaaactcacagagttgaacatacctttccgtagagcagttttgaaacactctgtttgtgggatccgcaagtggatatttggaccgctttgagacctttgctggaaacgggaatatcttcacatataaactagacagaagcattctcagaaacttcttcgtgatgtgtgcattctactcccgaatttgaatcttccttttcatgaagcagttttgaaacactctgtttgtgcaatccacagttggataattggaaggctttgatgcccatggtagaaaaggaaatatcctcatataaaaactagacagaaggattcacagaaaatgctttgtgatgtgtgcattcaaatcacggagttgaatctttcttttgtcagagcagttttgaaaaaatgtttctgtggaatctgccagcggacacttggagcgctttgagggctatggtggagaaggaaatatcttcccataaaaactagaaagaagcattctcagaaccatttatgtgaagcgtgcattcaactcacagagttgaaccttccttttgatagaacagttttgaaacactcttttgaacaattgcaggtgaatatttggagggctttgaagcctttgttggaaatgggaatatcttcacacacaaactagccagaagcattctcagaaacttctttgtgatgtgtgcgttgaacccagagagatgaacctttcctttgatagagcagttttgaaacttgtttttgtaagatcggcaagcggataattggcttcgctttgtgtcctttggtggaaacgggaatatcttctaataaaaactagacagaaatattctcagaatcttatttgtgatgtaggcattccactaacacagttgaagatttcttttcatagagtagttttgaaacactcttttggtagaatctgccagtggatatttggagcgctttgagggctattgtgccaatggaaatatcttcccctgaaaactagacagaagcattctcagaaactacttcgtgatgtttgcattcaactcacagagttgaacatacctcttcatagagcagttttgaaaacctctttctgtagaatctgcaagtggatattcggaccactttgaggccttcataggaaacagtaatatcttcacataaaaactagatagaagcattgtcagaaagttctttgtgatgtgtgaattcaactcacagtagttgaaacttcctttaatagagcagttttgaaacactctttttctggaatctgcaagtagatatttggagcgctttgaggccttcgttggaaaccggagtatcttcacaggaaaagtagataggggcattctcagaaacttgttttgtgatatgtagattcaactcacagcgttgaacctttctttggatggagcagttttgaaaacctcttttatcgaatctgcaggtaaacatttggggtgctttgagggctgtggtgcaaaaggaaatgtcttcccatagaaactagactgaagcattctcagaaactactttgtgacgtttgcattcatctcacagtgttgaacatacctttccatagagtagttttgaagcactatttttgtagaatctgcaagtggatatttggactgctttgaggccttcatcggaaacgggaatatcttcacataaacactagacagaagcattctcagaaacttctttgtgatctgtccattcaactcacagagttgaaccttcctttttatggagtagttttgaatcactgtttttggagaatctgcaagtggatatttggagcgctttgaggcctatggtagaaaaagaaatatctgcctctaaaaaccagacagaagcattccgagaaacttctctgtgatgtttgcattcaactagcagagttgtaccttccttttgatagggcagtttggaaacactctttttgtagaatctgcatgtggatatctggagcggtttgaggcctacggtcaaaaaggaaatatcttcctgggaaaaatagacgaaagcattctcagaaactgctttgtgatatgggaattcgactcaccgagttgaaacttttttttgatagagcagttttgaaacactctgtagaatctgaaagtggatatttggagctcttgcagggctatggcggaaaagaaaatatattcacattaaagtagacagcagcattctcagaaacttctttaggatgtttgcagtaaactcacagagttgaacctacctttctgtagagcagttttgaaacactctgtttgtgggatccgcaagtggatatttggaccgctttgagacctttgctggaaatgggaatatcttcacatataaactagacagaagcattctcagaaacttcttcatgatgtgtgcattctcctcccgaatttgaatcttccttttcatgaagcagttttgaaacactctgtttgtgcaatccacaattggataattggaacgctttgatgcccatggtagaaaaggaaatatcctcatataaaaactagacagaaggattcacagaaaatgctttgtgatgtgtgcattcaaatcacggagttgaatctttcttttgttagagcagttttcaaacactgtttctgtggaatctgccagcggacacttggagcgctttgagggctgtggtggagaaggaaatatcttcccataaaaactagaaagaagcattctcagaaacatttatgtgaagcgtgccttcaactcacagagttgaaccttccttttgatacaacagttttgaaacactctttggaacaattgcaggtgaatctttggagcgctttgaagcctttgttggaaatgggaatatcttcacacacaaactagccagaagcattctcagaaacttctttgtgatgtgtgcgttgaacccagagagatgaacctttcctttgaaagagcagttttgaaacgtgtttttgtaagatctgcaagcggatagttggcttcgctttgtgtcctttggtggaaacgggaatatcttctaataaaaactagacagaaatattctcagaatcttctttgtgatgtgggcattcaactaacacagttgaacctttcttttcacagagcagttttgaaacactcttttggtagaatctgccagtggatatttggagcgctttgagggctattgtgccaacggaaatatctgcccctaaaaactagacagaagcattctcagaaactacttcgtgatgtttgcattcaactcacagagttgaacatacctcatcacagagcagttttgaaaacctctttttgtagaatctgcaagtgtatattcggagcactttgaggccttcataggaaacagtaatatcttcgcataaaaactagatagaagcattgtcaggaagttctttgtgatgtgtgaattcaactcacagagttgaaccttcctttaatagagcagttttgaaacactctttttctagaatctgcaagtagatatttggagcgcttagaggccttctttggaaaccggaatatcttcacaggaaatgtagatagaggcattctcagaaacattttttgtgatatgtagattcaactcacagcgttgaacctttctttggatggagcagttttgaaaaactcttttatcgaatctgcaggtagacatttggggtgctttgagggctgtggtgcaaaaggaaatgtcttcccatagaaactagactgaagcattctcagcaacttctttgtgacgtttgcattcatctcacagtgttgaacatacctttccatagagtagttttgaaatactgtttttgtagaatcggcaagtggatatttggactgctttgaggccttcatcggaaacgggaatatcttcacataaacactagagagaagcattctcagaaacttctttgtgatctgtccattcaactcacagagttgaaccttcctttttatggagcagttttgaaacactccttttggagaatctgcaggtggatatttggagcgctttgaggcctatggtagaaaaagaaatatctgcctctaaaaaccagacagaagcattctgagaaacttctttgtgatgtttgccttcaactaccagagttgaaccttccttttcatagggcagtttggaaacactctttttgtagaatctgcatgtggatatctggagcgatttgaggcctacggtccaaaaggaaatatcttcctgggaaagatagacgaaagcattctcagcaactgctttgtgatatgtgcattcgactcaccgagttgaaacttttttttgatagagcagttttgaaacactctgtagaatctgaaagtggatatttggagatctttgagggctatgtcggaaaagaaaatatattcacattaaagtagacagcagcattcccagaaacttctttaggatgtttgcagtaaactcacagagttgaacatacctttccatagagcagctttgaaacactctgtgtgtgggatccgcaagtggatatttggaccgctttgagacctttgctggaaacgggaatatcttcaaatataaactggacagaagcattctaagaaacttcttcttgatgtgtgcattctactccagaatttgaatcttccttctcatgaagcagttttgaaacactctatttgcgcaatctacaattggataattggaacgctttgatgcccatggtagaaaaggaaatatcctcatataaaaactagacagaaggattcacagaaaatgctttgtgatgtgtgcattcaaatcacggagttgaatctttcttttgttatagcagttttgaaacactgtttctgtggaatctgccagcggacacttggagcgctttgagggctgtggtggagaaggaaatatcttcccataaaaactagaaagaagcattctcagaaccatttatgtgaagcgtgcgttcaactcacagagttgaaccttccttttgacagaacagttttgaaacactcttttgaacaattgcaggtgaatatttggagggctttgaagcctttgttggaaatgggaatatcttcacacacaaactagccagaagcattctcagaaacttctttgtgatgtgtgcgttgaacccagagagatgaacctttcctttgacagagcagttttgaaacgtgtttttgtaagatctgcaagcggatagttggcttcgctgtgtgtcctttggtggaaacgggaatatcttctaataaaaactagacagaaatattctcagaatctcctttgtgatgtgggcattcaactaacacagttgaacatttcttttcacagagcagttttgaaacactcttttggtagaatctgccagtggatatttggagcgcttggaggactattgtgccaatggaaatatctgcccctgaaaactggacagaagcattctcagaaactaattcgtgatgtttgcattcaacacacagagttgaacatacctcttcacagagcagttttgaaaacctctttctgtagaatctgcaagtggatattcggaccactttgaggccttcataggaaacagtaatatcttcacataaaaactagatagaagcattgtcagaaagttccttgtgatgtgtgaattcaactcacagagttgaaccttcctttaatagagcagttttgaaacactcttcttctagaatctgcaattagatatttggagcgctttgaggccttcattggaaaccggaatatcttcacagaaaaagtagatagaggcattctcagaaacttttttgtgatatgtagattcaactcacagcgttgaacctttctttggatggagcagttttgaaaaacccttttatcgaatctgcaggtagacatttggggtgctttgagggctgtggtgcaaaaggaaatgtcttcccatagaaactagactgaagcattctctcaacttctttgtgacgtttgcattcatctcacagtgttgaacatacctttccatcgagtacttttgaaacactgtttttgtagaatctgcaagtggatatttggactgctttgaggccttcatcggaaacgggaatatcttcacataaacactagagagaagcattctcagaaacttctttgtcatctgtccattcaactcacagagttgaaccttcctttttatggagcagttttgaaacactccttttggagaatctgcaagtggatatttggagcgctttgaggcctatggtagaaaaagaaatatctgcctctgaaaaccagacagaagcattccgagaaacttctttgtgatgtttgcattcaactagcagagttgaacttccttttgatagggcagtttggagacactctttttgtagaatctgcatgtggatatctggagcggtttgaggcctacggtcaaaaaggaaatatcttcctgggaaaaatagacgaaagcattctcagaaactgctttgtgatatgtgcattcgactctccgagttgaaacttttttttgatagagcagttttgaaacactctgtagaatctgaaagtggatatttggagctcttcgagggctatggcggaaaagaaaatgtattcacattaaactagacagcagcattcccagaaacttctttaagatgtttgcagtaaactcacagagttgaacatacctttccgtagagcagctttgaaacactctgtgtgtgggatccgcaagtggatatttggaccgctttgagacctttgctggaaacgggaatatcttcacatataaactggacagaagcattgtcagaaacttcttcgtgatgtgtgcattctactcccgaatgtgaatcttccttttcatgaagcagttttgaaacactctgtttgtgcaatccacaattggataattggaacgctttgatgcccatggtagaaaaggaaatatcttcatataaaaactagacagaaggattctcagaaaatgctttgtgatgtgtgcattcaaatcacggagttgaatctttcttttgttagagcagttttgaaacactgtttctgtggaatctgccagcggacacttggagcgctttgagggctatggtggagaaggaaatatcttcacataaaaactagaaagaagcattctcagaaccatttatgtgaagcgtgcattcaactcacagagttgaaccttccttttgatagaacagttttgaaacactcttttgaacaattgcaggtgaatatttggagggctttgaagcctttgttggaaatgggaatatcttcacacacaaactagccagaagcattctcagaaacttctttgtgatgtgtgcgttgaacccagagagatgaacctttccttggatagagcagttttgaaacgtgtttttgtaagatcggcaagcggataattggcttcgctttgtgtcctttggtggaatcgggaatatcttctaataaaaactagacagaaatattctcagaatctcctttgtgatgtgggcattcaactaacacagttgaacatttcttttcacagagcagttttgaaacactcttttggtagaatctgccagtggatatttggtgcgcttggagggctattttgccaatggaaatatctgcccctgaaaactagacagaagcattctcagaaactacttcgtgatgtctgcattcaacacacagagttgaacatacctcttcacagagcagttttgaaaacctctttctgtagaatctgcaagtggatattcggaccactttgaggccttcgtaggaaacagtattatcttcacataaaaactagatagaagcattgtcagaaagttctttgtgatgtgtgaattcaactcacagagttgaaccttcctttaatacagcagttttgaaacactctttttctagaatctgcaagtagatatttggagcgctttgaggccttcgttggaaaccggaatatcttcacaggaaaagtagatagaggcattctcagaaactttttcgtgatatgtggattcaagtcacagcgttgaacctttcttttgatagagcagttttgtaaaactcctttatcgaatctgcaagtagacatttggagtgctttgggggctgtggtgcaaaaggaaatgtcttcccatagaaagtagactgaagcattctcagcaacttcttggtgacgtttgcattcatctcatagtgttgaacatacctttccatagagtggttttgaaacactgtttttgtagaatcggcaagtggatatttggactgctttgaggccttcatcggaaacgggaatatcttcacataaacactagagagaagcattctcagaaactactttgtgatctgtccattcaactcacagagttgaaccttcctttttatggagcagttttgaaacactgtttttggagaatctgcaagtggatatttggagcgctttgaggcctatggtagaaaaagaaatatctgcctattacaactagacagaagcattctcagaaacttctttgtgatgtttgcattcaactaccagagttgaaccttccttttgatagggcagtttggaaacactctttttgtagaatctgcatgtggatatctggagcgatttgaggcctacggtccaaaaggaaatatcttcctgggaaaaatagacgaaagcattctcagaaactgctttttgatatgtgcattcgactcaccgatttgaaactttttttggatagagcagttttgaaacactctgtagaatttgcaagtgtatatttggagctctttgagggctatggcggaaaagaaaatatattcacattaaactagacagcagcattcccagaaacttctttaggatgtttgcagtaaactcacagatttgaacatacctttccgtagagcagctttgaaaaactctgtttgtgggatccgcaagtggatatttggaccgctttgagacctttgctggaaacgggaatatcttcacatataaactggacagaagcattctcagaaacttcttcgtgatgtgcgcattctactcccaaatttgaatcttccttctcatgaagcagttttgaaactctctatttgtgcaatctacaattggataattggaaccctttgatgcccatggtagaaaaggaaatatcctcatataaaaactagacagataaggattcacagaaaatgctttgtgatgtgtgcattcaaatcacggagttgaatctttcttttgttagatcagttttgaaacactgtttctgtggaatctgccagcggacacttggagcgctttgagggctatggtggagaaggaaatatcttcacataaaaactagaaagaagcattctcagaaccatttatgtgaagcgtgccttcaactcacagagttgaaccttccttttgatagaacagttttgaaacactcttttgaacaattgcaggtgaatatttggagggctttgaagcctttgttggaaatgggaatatcttcacacacaaactagccagaagcattctcagaaacttctttgtgatgtgtgcgttgaacccagagagatgaacctttcctttgaaagagcagttttgaaacgtgtttttgtaagatctgcaagcggatggttggcttcgctttgtgtcctttggtggaaacgggaatatcttctaataaaaactagacagaaatattctcagaatcttctttgtgatgtgggcattcaactaacagagttgaacgtttcttttgacagagcagttttgaaacactcttttggtagaatctgccagtggatatttggagcgctttgagggctattgtgccaacggaaatatctgcccctaaaaactagacagaagcattctcagaaactgctttgtgatgtttgcattcaactcacagaggtgaacatacctcttcatagagcagttttgcaaacctctttttgtagaatctgcaagtggatattcggaccactttgaggccttcataggaaacagtaatatcttcacataaaaactagatagaagcattgtcagaaagttctttgtgatgtgtgaattcaactcacagagttgaaccttcctttaatagagcagttttgaaacactctttttctagaatctgcaagtagatacttggagcgctttgaggccttctttggaaaccgggaatatcttcacataaaaagtagatagaggcattctcagaaactttttgtgatatgtagattcaactcacagcgttgaacctttctttggatggagcagttttgaaaaactcttttatcgaatctgcaggtagacattcggggtgctttgagggctgtggtgcaaaaggaaatgtcttcccatagaaactagactgaagcattctcagcaacttcttggtgacgtttgcattcatctcacagtgttgaacatacctttccatagagtggttttgaaacactgtttttgtagaatgggcaagtggatatttggactgctttgaggccttcatcggaaacgggaatatcttcacataaacactagagagaagcattctcagaaacttctttatcatctgtccattcaactcacagagttgaaccttcctttttatggagcagttttgaaacactccttttggagaatctgcaagtggatatttggagcgctttgaggcctatggtagaaaaagaaatatctgcctctaaaaacaagacagaagcattctcacaaagtgctttgtgatatgtgcattcgactcaccgagttgaaacttttttatgatagagcagttttgaaacactctgtagaatctgaaagtggatatttggagctcttcgagggctatggcggaaaagaaaatatattcacattaaactagacagcagcattctcagaaacatctttaggatgtttgcagtaaactcacagagttgaacatacctttccgtaaagcagttttgaaaccctctgtttgtgggatctgcaagtggatatttggaccgctttgagacctttgctggaaatgggaatatcttcacatataaactagacagaagcattctcagaagcttcttcgtgatgtgtgtattctactcccaaatttgaatcttccttttcatgaagcagttttgaaacactctgtttgtacaatccacaattgcataattggaacgctttgatgcccatggtagaaaaggaaatatcctcatataaaaactagacagaaggattcacagaaaatgctttgtgatgtgtgcattcaaatcacggagttgaatctttcttttgttagagcagttttgaaacactgtttctgtggaatctgccagcagacacttggagcgctttgagggctatggtggagaaggaaatatcttcccataaaaactagaaagaagcattctcggaaacatttatgtgaagcgtgcattcaactcacagagttgaacctttcttttgatagaacagttttgaaacactcttttgaacaattgcaggtgaatctttggagcgctttgaaggctttgttggaaatgggaatatcttcacacacaaactagccagaagcattctcagaaacttctttgtgatgtgtgcgttgaacccagagagatgaaactttcctttgatagagcagttttgaaacgtgtttttgtaagatctgcaagcggataattggcttcgctttgtgtcctttggtggaaacgggaatatcttctaataaaatctagacagaaatattctcagaatctcctttgtgatgtgggcattcaactaacacagttgaacatttcttttcacagagcagttttgagacactcttttggtagaatctgccagtggatctttggagcgctttgagggctgttgtgccaatggaaatatctgcccctaaaatctagacagaagcattctcagaaactgcttcgtgatgtttgcattcaactcacagacttgaacatacctcttcatagagcagttttgaaaacctctttttgtagaatctgcaagtggatattcggaccactttgaggccttcataggaaacagtaatatcttcacataaaaactagatagaagcattgtcagaaagttctttgtgatgtgtgaattcaactcacagagttgaaccttccttcaatagagcagttgtgaaacactctttttctagaatctgcaagtagatatttggagcgctttgaggccttcgttggaaaccggaatatcttcacaggaaaagtagatagaggcattctcagaaactttttcgtgatatgtggattcaactcacggcgttgaacctttcttttgatagagcagtgttgtaaaactcttttatcgaatctgcaagtagacatttggagtgctttgggggctgtggtgcaaaaggaaatgtcttcccatagaaactagactgaagcattctcagcaacttctttgtgacgtttgcattcatctcacagtgttgaacatacctttccatagagtagatttgaaacactatttttgtagaatctgcaagtggatatttggactgctttgaggcctccatcggaaacgggaatatattcacataaacactagacagaagcattctcagaaacttctttgtcatctgtccattcaactcacagaattgaaccttcctttttatggagcagttttgaaacactcttttggtagaatctgccagtggatatttggagcgcttggagggctattgtgccaatggaaatatctgcccctgaaaactagacagaagcattctgagaaaagttctttgtgatgtttgcattcaactagcagagttgaaccttccttttgatagggcagtttggaaacactctttttgtagaatcttcatgtggatatctggagcggtttgaggcctacggtcaaaaaggaaatatcttcctgggaaaaatagacgaaagcattctcagaaagtgctttgtgatatgcgcattcgactcaccgagttgaaacttttttttgatacagcagttttgaaacactctgtagaatctgaaagtggatatttggagctctttgagggctatggcggaaaagaaaatatattcacattaaagtagtcagcagcattctcagaaacttctttaggatgtttgcagtaaactcacagagttgaacatacctttccgtagagcagttttgaaacactctgtttgtgggatccgcaagtggatatttggaccgctttgagacctttgctggaaatgggaatatctgcacatttaaactagacagaagcattctcagaaacttcttggtgatgtgtgcattgtactcccaaatttgaatcttccttctcatggagcagttttcaaacactctgtttgtgcaatctacaattggagaattggaaggcttggatgcccgtggtagaaaaggaaatatcctcatataaaaactagacagaaggattcacagaaaatgctttgtgatgtgtgcattcaaatcacggagttgaatctttcttttgtcagagcagttttgaaacactgtttctgtggaatctgccagcggacacttggagcgctttgagggctatggttgagaaggaaatatcttcccataaaaactagaaagaagcattctcagaaacatttatgtgaagcgtgcattcaactcacagagttgaaccttccttttgatagaacagttttgaaacactcttttgaacaattgcaggtgaatctttggagcgctttgaagcctttgttggaaatgggaatatcttcacacacaaactagccagaagcattctcagaaacttctttgtgatgtgtgcgttgaacccagagagatgaacctttccttcgatagagcagttttgaaacgcgtttttgtaagatcggtaagcggataattggcttcgctttgtgtccttcggtggaaacgggaatatcttctaataaaaactagacagaaatattctcagaatctcctttgtgatgtgggcattcaactaacacagttgaacatttcttttcacagagcagttttgaaacactcttttggtagaatctgccagtggatatttggagcgcttggagggctgttgtgccaatggaaatacctgcccctgaaatctggacagaagcattctcagaaactacttcgtgatgtttgcattcaacacacagagttgaacatacctcttcacagagcagttttgaaaacctctttctgtagaatctgtaagtggatattgggaccactttgaggccttcataggaaacagtaatatcttcacataaaaactagatggaagcattctcagaaagttctttgtgatgtgtgaatccaactcacagagttgaaccttcctttaatacagcagtgttgaaacactccttttctagaatctgcaagtagatatttggagcgctttgaggccttcgttggaaaccggaatatcttcacaggaaaagtagatagaggcattctcagaaacttttttgtgatatgttgattcatctgacagcgttgaacctttcctttgatagagcagttttgaaaaactcttttgtcgaatctgcaagtagacatttggagtgctttgaggtctgtggtgccaaaggaaatgtcttcccatggaaactagactgaagcattctcagcaacttctttgtgacgtttgcattcatctcacagtgttgaacatacctttccatagagtagttttgagacactatttttgtagaatctgcaagcggatatttggactgctttgaggccttcatcggagacgggaatatcttcacataaacactaggcagaagcattctcagaaactactttgtgatctgtccattcaactcacagagttgaaccttcctttttatggagcagttttgaaacactgtttttggagaatctgcaagtggatatttggagcgctttgaggcctatggtagaaaaagaaatatctgcctctaaaaactagacagaagcattctgagaaacttctttgtgatgtttgcattcaactaccagagttgaatcttccttttgatagggcagtttggaaacactctttttgtagaatctgcatgtggatatctggagcgatttgaggcctatggtcaaaaaggaaatatcttcctgggaaaaatagacgaaagaattctcagaaactgctttgtgacatgtgcattcgactcaccgtgttgaaactgtttttcgatagagcagttttgaaacactctgtagaatctgaaagtggatatttggagctctttgagggctatggcggaaaagaaaatatattcacattaaagtagacagcagcattctcagaaacttctttaggatgtttgcagtaaactcacagagttgaacatacctttcggtagagcagttttgaaacactgtttgtgggatccgcaagtggatatttgcaccgctttgagacctttgctggaaatgggaatatcttcacatataaactagacggaagcattctcagaaacttcttcgtgatgtgtgcattctactcccgaatttgaatcttccttttcatgaagcagttttgaaacactctgtttgtgcaatccacaagtggataattggaacgctttgatgcgcatggtagaaaaggaaatatcctcatataaaaactagacagaaggattcacagaaaatgctttgtgatgtgtgcattcaaatcacggagttgaatctttcttttgttagagcagttttgaaacactgtttctgtggaatctgccagcggacacttggagcgctttgagggctatggtggagaagggaaatatcttcccataaaaactagagagaagcattctcggaaacatttatgtgaagcgtgcattcaactcacagagttgaacctttcttttgagagaacagttttgaaacactcttttgaacaattgcaggtgaatctttggagcgctttgaaggctttgttggaaatgggaatatcttcacacacaaactagccagaagcattctcagaaacttctttgtgatgtgtgcgttgaacccagagagatgaacctttcctttgatagagcagttttgaaacgtgtttttgtaagatctgcaagcggatagttggcttcgctttgtgtcctttggtggaaacgggaatattttctaataaaaactagacagaaatattctcagaatcttctttgtgatgtgggcattcaactaacacagttgaacctttcttttcacagagcagttttgaaagactcttttggtagaatctgccagtggatatttggagcgctttgagggctattgtgccaatggaaatatcttcccctaaaaactagacagaagcattctcagaaactgctttgtgatgtttgcattcaactcacagagttgaacataccttttcatagagcagttttgaaaacctctttttgtagaatctgcaagaggatattcggaccactttgaggccttcataggaaacagtaatatcttcgcataaaaactagatagaagcattgtcagaaagttctttgtgatgtgtgaaatcaactcacagagttgaaccttcctttaatagagcagttttgaaacactctttttctagaatctgcaagtagatatttggagcgctttgaggccttctttggaaaccggaatatcttcacataaaaagtagatagaggcatgctcagaaacttttctgtcatatgtagattcaactcacagcgttgaacctttcttttgatagagcagttttgaaaaactcttttatcgaatctgcaagtagacatttggagtgctttgagggctgtggtgcaaaaggaaatgtcttcccgtagaaactagactgaagcattctcagcaacttcttggtgacgtttgcattcatctcacagtgttgaacatacctctccatagagtggttttgaaacactgtttttgtagaatcggcaagtggatatttggactgctttgaggccttcatcggaaacgggaatatcttcacataaacactagagagaagcattctcagaaacttctttgtgatctgtccattcaactcacagagttgaaccttcctttttatggagcagttttgaatcactgtttttggagaatctgcaagtggatatttggagtgctttgaggcctatggtagaaaaagaaatatctgcctctaaaaaccagacagaagcattctgagaaacttctttgtgatgtttgcattcaactaccagagttgaatcttccttttgatagggcagtttggaaacactctttttgtagaatctgcatgtggatatctggagcgatttgaggcctacggtccaaaaggaaatatcttcctgggaaaaatagaggaaagcattctcagaaactgctttgtgatatgtgcattcgactcaccgagttgaaactttttttggatagagcagttttgaaacactctgtagaatctgaaggtggatatttggagctctttgagggctatggcggaaaagaaaagatattcacattaaactagacagcagcattctcagagacttcttgaggatgtttgcagtaaactcacagagttgaacatacctttccgtaaagcagttttgaaaccctctgtttgtgggatctgcaagtggatatttggaccgctttgagacctttgctggaaatgggaatatcttcacatataaactagacagaagcattctcagaaacttcttcgtgatgtgtgcattctcctcgcaaatttgaatcttccttttcatgaagcagttttgaaacactctgtttgtgcaatccacaattggataattggaacgctttgatgcccatggtagaaaaggaaatatcctcatataaaaactagacagaaggattcacagaaaatgctttgtgatgtgtgcattcagatcacggagttgaatctttcttttgttagagcagttttgaaacactgtttctgtgcaatctgccagcggacacttggagcgctttgagggctatggtggagaaggaaatatcttcacataaaaactagaaagaaaagcattctcagaaacatttatgtgaagcgtgcattcaactcacagagttgaaccttccttttgatacaacagttttgaaacactcttttgaacaattgcaggtgaatctttggagcgctttgaagcctttgttgcaaatgggaatatcttcacacacaaactagccagaaagcattctcagaaacttctttgtgatgtgtgcgttgaacccagagagatgaacctttcctttgatagagcagttttgaaacgtgtttttgtaagatcggcaagcggataattggcttcgctttgtgtcctttggtggaaacgggaatatcttctaataaaaactagacagaatattctcagaatctcctttgtgatgtgggcattcaactaacacagttgaacatttcttttcacagagcagttttgaaacactcttttggtagaatctgccagtggatacttggagagcttggagggctattgtgccaatggaaatatctgcccctgaaaactagacagaagcattctcagaaactacttcgtgatgtttgcattcaacacacagagttgaacatacctcttcacagagcagttttgaaaacctctttctgtagaatctgcaagtggatattcggaccactttgaggccttcacaggaaacagtaatatcttcacataaaaactagacagaagcattgtcagaaagttctttgtgatgtgtgaattcaactcacagtgttgaaccttcttttcatagagcagttttgaaacactctttttctagaatctgcaagtagatatttggagcgctttgaggccttcgttggaaaccggaatatcttcacataaaaagtagatagaggcattctcagaaacttttttgtgatatgtagattcaactcacagcgttgaacctttcttttgatagagcagttttggaaaactcttttatcgaatctgcaagtagacatttggagtgctttgagggctctggtgcaaaaggaaatgtcttcccatagaaactagactgaaagcattctcagcaacttcttggtgacgtttgcatgcatctcacagtgttgaacatacctttgcatagagcggttttgaaacactatttttgtagaatctgcaagtggatatttggactgctttgaggccttcatcggaaacgggaatatcttcacataaacactagacagaagcattctgagaaacttctttgtgatctgtccattcaactcacagagttgaaccttcctttttatggagcagttttgaatcactgtttttggagaatctgcaagtggatatttggagcgctttgaggcctatggtagaaaaagaaatatctgcctctaaaaaccagacagaagcattccgagaaacttctttgtgatgtttgcattcaactagcagagttgaaccttccatttgatagggcagtttggaaacactctttttgtagaatctgcatgtggatatctggagcggtttgaggcctacggtcaaaaaggaaatatcttcctgggaaaaatagacgaaagcatcctcagtaaactgctttgtgatatgtgcattcgactcactgagttgaaactttttttggatagagcagttttgaaacactctgtagaatctgaaagtggatatttggagctctttgagggctatggcggaaaagaaaatatattcacattaaactagacagcagcattctcagaaacttctttaggatgtttgcagtaaactcacagagttgaacatacctttccgtagagcagttttgaaacactctgtttgtgggatccgcaagtggatatttggaccgatttgagacctttgctgcaaatgggaatatcttcacatataaactagacagaagcattctcagaaacttcctcgtgatgtgtgcattctactcccgaatttgaatcttccttttcatgaagcagttttgaaacactctgtttgtgcaatccacaattggataattggaacgctttgatgcccatggtagaaaaggaaatatcctcatatgaaaactagacagaatgattcacagaaaatgctttgtgatgtgtgcattcaaatcacggagttgaatctttcttttgtcagagcagttttgaaacactgtttctgtggaatctgccagtggacacttggagcgctttgagggctgtggtggagaaggaaatatcttcccataaaaactagaaagaagcattctcagaaacatttatgtgaagcgtgcattcaactcacagagttgaaccttcctttgatacaacagttttgaaacactcttttgaacaattgcaggtgaatctttggagcgctttgaagcctttgttggaaatgggaatatcttcacacgcaaactagccagaagcattctcagaaacttctttgtgatgtgtgcgttgaacccagagagatgaacctttcctttgatagagcagttttgaaacgtgtttttgtaagatctgcaagcggatagttggcttcgctttgtgtcctttggtggaaacggcaatatcttctaataaaaactagagagaaatattctcagaatctactttgtgatgtgggcattcaacttacacagttgaacatttcttttcacagagcagttttgaaacactcttttggtagaatctgccagtggatatttggagcgcttggagggctattgtgccaatggaaatatctgcccctgaaaactagacagaagcattctcagaaactactttgtgatgtttgcattcaactcacagagttgaacatacctcttcatagagcagttttgaaaacccctttttgtagaatctgcaagtggatattcggaccactttgaggccttcataggaaacagtaacatcttcacataaaaactagatagaagcattgtcagaaagttctttgtgatgtgtgaattcaactcacagagttgaaccttcctttaatagagcagttttgaaacactctttttctacaatctgcaagtagatatttggagcgcttggaggccttcgttggaaaccggaatatcttcacaggaaatgtagatagaggcattctcagaaacttttttgtgatatgtagattcaacttacagcgttgaacctttctttggatggagcagttttgaaaaacccttttatcgaatctgcaggtagacatttggggtgctttgagggctgtggtgcaaaaggaaatgtcttcccatagaaactagactgaagcattctcagcaacttctttgtgacgtttgcattcatgtcacagtgttgaacatacctttccatagagtagttttgaagcactatttttgtagaatctgcaagtggatatttggactgctttgaggccttcatcggaaacgggaatatcttcacataaacactagacagaagcattctcagaaacttctttgtggtctgtccattcaactcacagagttgaaccttcctttatatggagcagttttgaaaccctgtttttggagaatctgcaagtggatatttggagcactttgaggcctatggtagaaaaagaaatatctgcctatcacagctagacagaagcattccgagaaacttctttgtgatgtttccattcaactagcagagttgaaccttccttttgatagggcagtttggagacactctttttgtagaatctgcatgtggatatctggagcggtttgaggcctacggtcaaaaaggaaatatcttcctgggaaaaatagacgaaagcattctcagaaagtgctttgtgatatgtgcattcgactcaccaagttgaaacttttttttgatagagaagttttgaaacactctgtagaatctgaaagtggatatttggagctccttgagggctatggcggaaaagaaaatatattcacattaaagtagacagcagcattctcagaaacttctttaggatgtttgcagtaaactctcagagttgaacctacctttccgtagagcagttttgaaacactctgtttgtgggatccgcaagtggatatttggaccgctttgagacctttgctggaaatgggaatatcttcacatataaactagacagaagcattctcagaaacttcttcgtgatgtgtgcattctactcccgaatttgaatcttccttttcatgaagcagttttgaaacactctgttagcgcaatccacaattggataattggaacgctttgatgcccatggtagaaaaggaaatatcctcatataaaaactagacagaaggattcacagaaaatgctttgtgatgtgtgcattcaaatcacggagttgaatctttcttttgttagagcagttttgaaacactgtttctgtggaatctgccagcgtacacttggagcgctttgagggctacggtggagaaggaaatatcttcacataaaaactagaaagacgcattctcagaaacatttatgtgaagcgtgcattcaactcacagagttgaaccttccttttgatagaacagttttgaaacactcttttgaacaattgcaggtgaatctttggagcgctttgaagcctttgttggaaatgggaatatcttcacacacaaactagccagaagcattctcagaaacttccttgtgatgtgtgcgttgaacccagagagatgaaccattcctttgatagagcagttttgaaacgtgtttttgtaagatctgcaagcggatagttggcttcgctttgtgtcctttggtggaaacgggaatatcttctaataaaaactagacagaaatattctcagaatctcctttgtgaagtgggcattcaactaacacagttgaacatttcttttcacagagcagttttgaaacactcttttggtagaatctgccagtggatatttggagcgcttggagggctattgtgccaatggaaatatctgcccctgaaaactagacagaagcattctcagaaactacttcgtgatgtctgcattcaacacacagagttgaacatacctcttcagagagcagttttgaaaacctctttctgtagaatctgcaagtggatattcgggccactttgaggccttcataggaaacagtaatatcttcacataaaaactaaatagaagcattgtcagaaagttctttgtgatgcgtgaattcaactcacagagttgaaccttcctttaatagagcagttttgaaacactctttttctagaatctgcaagtagatatttggagcgctttgaggccttcgttggaaaccggaatatcttcacaggaaaagtagatagaggcattctcagaaacttttttgtgatatgtagattcaactcacagcgttgaacctttctttggatggagcagttttgaaaaactcttttatcgaatctgcaggtagactttcggggtgctttgagagctgtggtgcaaaaggaaatgtcttcccatagaaactagactgaatcattctcagcaacttcttggtgacgtttgcattcatctcacagtgttgaacatacctttgcatagagtagtttggaaacactatttttgtagaatctgcaagtggacatttggactgctttgaggccttcatcggaaacgggaatatcttcacataaacactagacagaatcattctcagaaacttctttgtcatctgtccattcaactcacagagttgaaccttcctttttctggagcagttttgaaacactccttttggagaatctgcaagtggatatttggagcgctttgaggcctatggtagaaaaagaaatatctgcctctaaaaaccagacagaaacattccaagaaacttctctgtgatgtttgcattcaactagcagagttgaaccttccttttgatagggcagtttggaaatactctttttgtagaatctgcatttggatatctggagcggtttgaggcctacggtcaaaaaggaaatatcttcctgggaaaaatagacgaaagcattctcagaaactgctttgtgatatgtgcattcgaatcaccgagttgaaacttttttttcatagagcagttttgaaacactctgtagattctgaaagtggctatttggaggtctttgagggctatggcggaaaagaaaatatattcacattaaactagacagcagcattctcagaaacctctttaggatgtttgcagtaaactcacagagttgaacatacctttccgtagagcagttttgaaacactctgtttgtgggatccgcaaggggatatttggaccgctttgagacctttgctggaaatgggaatatcttcacatataaactagacagaagcattctcagaaacttctttcgtgatgtgtgcattctactcccaaatttgaatcttccttttcatgaagcagttttgaaacactcggtttgtgcaatccacaattggataattggaacgctttgatgcccatggtagaaaaggaaatatcctcatataaaaactagacagaaggattcacagaaaatgctttgtgatgtgtgcattcaaatcacggagttgaatctttcttttgtcagagcagttttgaaacactgtttctgtggaatctgccagcggacacttggagcgctttgaggactatggtggagaaggaaatatcttcccataaaaactagaaagaagcattctcagaaccatttatgtgaagcatgcattcaactcacagagttgaaccttccttttgatagaacagttttgaaacactcttttgaacaattgcaggtgaatatttggagggctttgaagcctttgttggaaacgggaatatcttcacacacgaactagccagaagctttctcagaaacttctttgtgatgtgtgcgttgaacccagagagatgaacctttcctttgatagagcagttttgaaacgtgtttttgtaagatctgcaagcggatagttggcttcgctttgtgtcctttggtggaaacgggaatatcttctaataaaaactagacagaaatattctcagaatcttctttgtgatgtgggcattcaactaacagagttgaacgtttcttttcacagagcagttttgaaactctcttttggtagaatctgccagtggatatttggagcgctttgagggctattgtgccaacggaaatatctgcccctaaaaactagacagaagcattctcagaaactacttcgtgatgtttgcattcaacacacagagttgaacataccccttcccagagcagttttgaaaacctctttctgtagaatctgcaagtggatattcggaccactttgaggccttcataggaaacagtaatatcttcacataaaaactaaaaagaagcattgtcagaaagttctttgtgatgtgtgaattcaactcacagagttgaaccttcctttaatagagcagttttgaaacactctttttctagaatctgcaagtagatatttggagcgctttgaggccttcgttggaaactggaatatcttcacaggaaaagtagatagaggcattctcagaaacttttttgtgatatgtagattcaactcacagcgttgaacctttctttggatggagcagttttgaaaaactcctttatcgaatctgcaggtagacatttggggtgctttgagggctgtggtgcaaaaggaaatgtcttcccatagaaactagactgaagcattctcagcaacttcttggtgacgtttgcattcatctcacagtgttgaacatacgtttccatagagtggttttgaaacactgtttttgtagaatcggcaagtggatatttggactgctttcaggccttcatcggaaacgggaatatcttcacataaacactagagagaagcattctcagaaacttctttgtcatctgtccattcaactcacagagttgaaccttcctttttatggagcagttttgaaacactccttttggagaatctgcaagtggatatttggagcgctttgaggcctatggtagaaaaagaaatatctgcctctaaaaaccagacaaaagcattctgagaaacttctttgtgatgtttgcattcaaataccagcagttgaaccttccttttgatagggcagtttggaaacattctttttgtagaatctgcatgtggatatctggagcgatttgaggcctacggtcaaaaaggaaatatcttcctgggaaaaatagacgaaagcattctcagaaagtgctttgtgatatgtgcattcggctcaccgatttgaaacctttttttgatagagcagttttaaaacacactgtagaatctgaaagtggatatttggagctctttgagggctatggcggaaaagaaaatatattcacattaaagtagacagccagcattctcagaaacttctttaggatgtttgcagtaaactcacagagttgaacatacctttccgtagagcagttttgaaacactctgtttgtgggatccgcaagtggatatttggaccgctttgagacctttgctggaaatgggaatatcttcacgtataaactagacagagcattctcagaaacttcttggtgatgtgtgcattgtactcccaaatttgaatcttccttctcatggaacagttttgaaacactctgtttgtgcaatatacaattggagaattggaacgcttggatgcccgtggtagaaaaggaaatatcctcatataaaaactagacagaaggattcacagaaaatgctttgtgatgtgtgcattcaaatcacggagttgaatctttcttttgtcagagcagttttgaaacactgtttctgtggaatctgccagcggacacttggagcgctttgagggctatggtggagaaggaaatatcttcccataaaaactagaaagaagcattctcggaaacatttatgtgaagcgtgcattcaactcacagagttgaaccttccttttgatagaacagttttgaaacactcttttgaacaattacaggtgaatctttggagcgctttgaagcctttgttggaaatgggaatatcttcacacacaaactagccagaagcattctcagaaacttcttcgtgatgtgtgcgttgaacccagagagatgaacctttccttcgatagagcagttttgaaacgtgcttttgtaagatctgcaagcgcataattggcttcactttgtgtcctttggttgaaacgggaatatcttctaataaaaactagacagaaatattctcagaatctcctttgtgatgtgggcattcaactaacacagttgaacatttcttttcacagagcagttttgaaacactcttttggtagaatctgccagtggatacttggagcgcttggagggctattgtgccaatggaaatatctgcccctgaaaactagacagaagcattctcagaaactgctttgtgatgtttgcattcaactcacagagttgaacataccttttcatagagcagttttgaaaatatctttttgtagaatctgcaagtggatattcggaccagtttgaggccttcataggaaacagtaatatcttcacataaaaactagatagaagcattgtcagaaagttctttgtgatgtgtgaattcaacccacagagttgaaccttcctttaatagagcagttttgaaacactctttttctagagtctgcaagtagatatttggagcgctttgaggccttctttggaaaccggaatatcttcacataaaaagtagatagaggcattctcagaaacttttttgtgatatgttgattcatctgacagcgttgaacccttcttttgatagagcagttttgaaaaactcttttgtcgaatctgcaagtagacatttggagtgctttgagggctgtggtgccaaaggaaatgtcttcccatggaaactagactgaagcattctcagcaacttctttgtgacgtttgcattcatctcacagtgttgaacatacctttccatagagtagttttgagacactatttttgtagaatctgcaagtggatatttggactgctttgaggccttcatcggagacgggaatatcttcacataaacactagacagaagcattctcagaaacttctttgtcatctgtccattcaactcacagagttgaaccttcctttttatggagccgttttgaaacactccttttggagaatctgcaagtggatatttggagcgctttgaggcctatggtagaaaaagaaatatccgcccctaaaaaccagacagaagcattctgagaaacttctttgtgatgtttgcattcaactaccagagttgaaccttccttttgatagggcagtttggaaacactctttttgtagaatctgcatgtggatatctggagcgatttgaggcctacagtcaaaaaggaaatatcttcctgggaaaaatagacgaaagcattctcagaaactgctttctgatatgtgcattcgactcaccgagttgaaacttttttttgatagagaagttttgaaacactctgtagaatctgaaagtggatatttggagctctttgagggctatggcggaaaagaaaatatattcacattaaactagacagcagaattcccagaaaattctttaggatgtttgcagtaaactcacagagttgaacatacctttccgtagagcagttttgaaacactctgtttgtgggatccgcaattggattttggaccgctttgagacctttgctggaaacgggaatatcttcacatataaactagacagaagcattctcagaaacttcttcatgatgtgtgcattctactcccgaatttgaatcttccttttcatgaagcagttttgaaacactctgtttgtgcaatccacaattggataattggaacgctttgatgcccatggtagaaaaggaaatatcctcatataaaaactagacagaaggattcacagaaaatgctttgtgatgtgtgcattcaaatcacgcagttgaatctttcttttgttagagcagttttgaaacactgtttctgtggaatctgccagcggacacttgtagcgctttgagggctatggtggagaaggaaatatcttcacataaaaactagaaagaagcattctcagaaccatttatgtgaagcgtgcgttcaactcacagagttgaaccttccttttgatagtacagttttgaaacactcttttgaacaattgcaggtgaatatttggagggctttgaagcctttgttggaaatgggaatatcttcacacacaaactagccagaagcattctcagaaacttctttgtgatgtgtgcgttgaacccagagagatgaacctttcctttgatagagcagttttgaaacgtgcttttgtaagatcggcaagcggataattggcttcgctttgtgtcctttggtggaaacgggaatatcttctaataaaaactagacagaaatattctcagaatcttctttgtgatgtgggcattcaactaacacagttgaacgtttcttttcacagagcagttttgaaacactcttttggtagaatctgccagtggatatttggagcgctttgagggctattgtgccaatggaaatatcttcccatagaaactagacagaagcattctcagaaactacttcgtgatgtttgccttcaactcacagagttgaacatacctcttcatagagcagttttgaaaacctctttctgtagaatctgcaagtggatattcggaccactttgaggccttcataggaaacagtaatatcttcacataaaaactagatagaagcattgtcagaaagttctttgtgatgtgtgaattcaactcacagagttgaaccttcctttaatagagcagttttgaaacactctttttctagaatctgcaagtagatatttggagcgctttgaggccttcgttggaatccggaatatcttcacataaaacgtagatagaggcattctcagaaacttttttgtgatatgtagattcaactcacagcgttgaacctttcttttgatacagcggttttcaaaaactcttatgtcgaatctgcaagtagacatttggagtgctttgagggctgtggtgcaaaaggaaatgtcttcccatagaaactagactgaatcattctcaacaacttccttgtgacgtttgcattcatctcacagtgttgaacataccttttcatagagcagttttgaaacactctttttgtagaatctgcaattggatatttggactgcgttgaggccttcactggaaacgggaatatctacacataaacactagacagaagcattctgagaaacttctttgtgatctgtccattcaactcacagagttgaaccttcctttttatggagccgttttgaaacactgtttttgtagaatctgcaagtggatatttggagcgctttgaagcctatggtagagaaagaaatatctgcatatcaaaactagacagaagcattccgagaaacttctctgtgatgtttgcattcaactagcagagttgaaccttccttttgatagggcagtttggaaacactctttttgtagaatctgcatgtggatatctggagcggtttgaggcctacggtcaaaaaggaaatatcttcctgggaaaaatagacgaaaagcattctcagaaactgctttgtgatatgtgcattcgactcaccgagttgaaacttttttttgatacagcagttttgaaacactctgtagaatctgaaagtggatatttggagctctttgagggctatggcggaaaagaaaatatattcacattaaagtagacagcagcattctcagaaacttctttaggatgtttgcagtaaactcacagagttgaacctacctttccgtagagcagttttgaaacactctgtttgtgggatccgcaagtggatatttggaccgctttgagacatttgctggaaatgggaatatcttcacatataaactagacagaagcattctcagaaacttcttcgtgatgtgtgcattgtactcccaaatttgaatcttccttctcatggagcagttttgaaacactctgtttgtgcaatctaccattggagaataggaacgcttggatgcccgtggtagaaaaggaaatatcctcatataaaaactagacagaaggattcacagaaaatgctttgtgatgtgtgcattcaaatcatggagttgaatctttcttttgttagagcagttttgaaacactgtttctgtggaatctgccagcggacacttggagcgctttgagggctatggtggagaaggaaatatcttcacataaaaactagaaagaagcattctcggaaacatttatgtgaagcgtgccttcaactcacagagttgaaccttccttttgatagaacagttttgaaacactcttttgaacaattgcaggtgaatctttggagcgctttgaagcctttgttggaaatgggaatatcttcacacacaaactagccagaagcattctcagaaacttctttgtgatgtgtgcgttgaacccagagagatgaacctttcctttgatagagcagttttgaaacgtgtttttgtaagatctgcaagcggataattggctttgctttgtgtcctttggtggaaacgggaatatcttctaataaaaactagacagaaatattctcagaatcttctttgtgatgtgggcattcaactaacacagttgaacgcttcttttcacagagcagttttgaaacactcttttggtagaatctgccagtggatatttggagcgctttgagggctattgtgccaatggaaatatctgcccttaaaactagacagaagcattctcagaaactacttcatgatgtttgcattcaacacacagagttgaacatacctcttcacagagcagttttgaaaacctctttctgtagaatctgcaagtggatattcggaccactttgaggccttcataggaaacagtaatatcttcacataaaaactagatagaagcattgtcagaaagttctttgtgatgtgtgaattcaactcacagagttgaaccttcctttaatagagcagttttgaaacactcttcttctagaatctgcaagtagatatttggagcgctttgaggccttcgttggaaaccggaatatcttcacagaaaaagtagatagaggcattctcagaaacttttttgtgatatgttgattcatctgacagcgttgtacctttcttttgatagagcagttttgaaaaactcttttgtcgaatctgcaagtagacatttggagtgctttgagggctgtggtgcaaaaggaaatgtcttcccatggaaactagactgaagcattctcagcaacttcttggtgacgtttgcatgcatctcacagtgttgaacatacctttccatagagtggttttgaaacactgtttttgtagaatcggcaagtggatatttggactgctttgaggccttcatcggaaacgggaatatcttcacataaacactagagagaagcattctcagaaacttctttgtcatctgtccattcaactcacagaggtgaaccttcctttttatggagcagttttgaaacactgtttttggagaatctgcaagtggatatttggagcgctttgaggcgtatggtagaaaaagaaatatctgcctctaaaaaccagacagaagcattccgagaaacttctttgtgatgtttgcattcaactagcagagttgaaccttccttttgatagggcagtttggaaacactctttttgtagaatctgcatgtggatatctggagcggtttgaggcctacggttaaaaaggaaatatcttcctgggaaaaatagacgaaagcattctcagaaacttctttgtgatatgtgcattcgactctccgagttgaaactttttttggatagagcagttttgaaacactctgtagaatctgaaagtggatatttggagctctttgagggctatggcggaaaagaaaagatattcacattaaactagacagcagcattctcagaaacttctttaggatgtttgcagtaaactcacagagttgaacctacctttccgtagagcagttttgaaacactctgtttgtgggatccgcaagtggatatttggaccgctttgagacctttgctggaaatgggaatatctgcacatataaactagacagaagcattctcagaaacttcttggtgatgtgtgcagtctcctcccgaatttgaatcttccttttcatgaagcagttttcaaacactctgtttgtgcaatccacaattggataattggaacactttgatgcccatggtagaaaaggaaatatcctcatataaaaactagacagaaggattcacagaaaatgctttgtgatgtgtgcattcaaatcacggagttgaatctttcttttgtcagagcagttttgaaacactgtttctgtggaatctgactgcggacacttggagcgctttgagggctatggtggagaaggaaatatcttcccataaaaactagaaagaagcattctcggaaacatttatgtgaagcgtgccttcaactcacagagttgaaccttccttttgatagaacagttttgaaacactcttttgaacaattgcaggggaatctttggagcgctttgaagcctttgttggaaatgggaatatcttcacacacaaactagccagaagcattctcagaaacttctttgtgatgtgtgcgttgaacccacagagatgaacctttcctttgatgcagcacttttgaaacgtgtttttgtaagatcggcaagcggataactggcttcgctttgtgtcctttggtggaaacgggaatatcttctaataaaaactagacagaaatattctcagaatctcctttgtgatgtgggcattcaactaacacagttgaacatttcttttcagagagcagttttgaaacactcttttggtagaatctgccagtggatatttggagcgctttgagggctgttgtgccaatggaaatatctgcccctaaaatctagacagaagcattctcagaaactgctttgtgatgtttgcattcaactcacagagttgaacatacctttacatagagcagttttgaaaacctctttttgtagaatctgcaagaggatattcggaccactttgaggccttcataggaaacagtaatatcttcacataaaaactagatagaagcattgtcagaaagttctttgtgatgtgtgaattcaactcacagagttgaaccttcctttaatagagcagttttgaaatactctttttctagaatctgcaactagatatgtggagcgctttgaggccttctttggaaaccggaatatcttcacataaaaagtagatagaggcattctcagaaacttttttgtgatatgtagattcaactcacagcgttgaacctttctttggatggagtagttttgaaaaactcttttatcgaatctgcaggtagacatttggggtgctttgagggctgtggtgcaaaaggaaatgtcttcccatagaaactagactgaaagcattctcagcaacttctttgtgacgtttgcattcatctcacagtgttgaacatacctttccatcgagtacttttgaaacactgtttttgtagaatctgcaagtggatatgtggactgctttgaggccttcatcggaaacgggaatatcttcacataaacactagagagaagcattctcagaaactactttgtgatctgtccattcaactcacagagttgaaccttcctttttatggagcagttttggatcactgtttttggagaatctgcaagtggatatttggagcgctttgaggcctatggtagaaaaagaaatatctgcctctaaaaaccagacagaagcattccgagaaacttctttgtgatgtttgcattcaactagcagagttgaaccttccttttgatagggcagttttgaaacactctttttgtagaatctgcatgtggatatctggagcggtttgaggcctacggtcaaaaaggaaatatcttcctgggaaaaatagacgaaagcattctcagaaactgctttgtgatatgtgcattcgactcaccgagttgaaacttttttttgatagagcagttttgaaacactctgtagaatctgaaagtggatagttggagctctttgagggctatggcggaaaagaaaatatattcacattaaagtagacagcagcattctcagaaacttctttaggatgtttgtagtaaactcacagagttgaacatacctttccgtagagcagttttgaaacactctgtttgtggtatccgcaagtggatatttggaccgctttgagacctttgctggaaatgggaatatcttcacatataaactagacagaagcattctcagaaacttcttcgtgatgtgtgcattctactcccgaatgtgaatcttccttttcatgaagcagttttgaaacactctgtttgtgcaatccacaattggataattggaacgctttgatgcccatggtagaaaaggaaatatcttcatataaaaactagacagaaggattcacagaaaatgctttgtgatgtgtgcattcaaatcatggagttgaatctttcttttgttagagcagttttgaaacactgtttctgtggaatctgccagtggacacttggagcgctttgagggctatggtggagaaggaaatatcttcccataaaaactagaaagaagcattctcagaaacatttatgtgaagcgtgcattcaactcacagagttgaaccttccttttgatacaacagttttgaaacactcttttgaacaattgcaggtgaatctttggagcgctttgaagcctttgttgcaaatgggaatatcttcacacacaaactagccagaagcattctcagaaacttctttgtgatgtgtgcgttgaacccagagagatgaacctttccttggatagagcagttttgaaacgtgtttttgtaagatctgcaagcggataattggcttcgctttgtgtcctttggtggaaacgggaatatcttctaataaaaactagacagaaatattctcagaatctcctttgtgatatgggcattcaactaacacagttgaacatttcttttcacagagcagttttgaaacactcttttggtagaatctgccagtggatatttggagcgcttggagggctattgtgccaatggaaatatctgcccctgaaaactagacagaagcattctcagaaactgctttgggatgtttgcattcaactcacagcagttgaacatacctctgcatagagcagttttgaaaacctctttttgtagaatctgcaagtggatattcggaccactttgaggccttcataggaaacagtaatatcatcacataaaaactagatagaaacattgtcagaaagttctttgtgatgtgtgaattcaactcacagagttgaaccttcctttaatagagcagttttgaaacactctttttctagaatctgccagtagatatttggagcgctttgaggccttcgttggaaaccggaatatctccacataaaaagtagatagaggcattctcagaaacttttttgtgatatgtagattcaacttacagcgttgaacctttctttggatggagcagttttgaaaaacccttttatcgaatctgcaggtagacaattggggtgctttgagggctgtggtgcaaaaggaaatgtcttcccatagaaactagactgaagcattgtcagcaacttcttggtgacgtttgcattcatctcacagcgttgaacatacctttccatagagtggttttgaaacactgtttttgtagaatcggcaagtggatatttggactgctttcaggccttcatcagaaacgggaatatcttcacataaacactagagagaagcattctcagaaacttctttgtgatctgtccattcaactcacagagttgtaccttcctttttctggagcagttttgaaacactccttttggagaatctgcaagtggatatttggagcgctttgaggcctatggtagaaaaagaaatatctgcctctaaaaaccagacagaagcattccgagaaacttctttgtgatgtttgcattcaactagcagagtggaaccttccttttgatagggcagtttggaaacactctttttgtagaatctgcatgtggatatctggagcggtttgaggcctacggtcaaaaaggaaatatcttcctgggaaaaatagacgaaagcattctcagaaagtgctttgtgatatgtgcattcgactcaccgagttgaaacttttttttgatagagcagttttgaaacactctgcagaatctgaaagtggatatttggagctctttgagggctatggcggaaaagaaaatatattcacattaaagtagacagcagcattctcagaaacttctttaggatgtttgcagtaaactcacagagttgaacatacctttccgtagagcagttttgaaacactctgtttgtgggatccgcaaggggatatttggaccgctttgagacctttgctggaaatgggaatatcttcacgtataaactagacagaagcattctcagaaacttcctcgtgatgtgtgcattcttctcccgaatttgaatcttccttttcatgaagcagttttgaaacactctgtttgtgcaatccacaattggataattggaacgctttgatgcccatggtagaaaacgaaatatcctcatataaaaattagacagaaggattcagagaaaatgctttgtgatgtgtgcattcaaatcacggaggtgaatctttgttttcttagagcagttttgaaacactgtttctgtggaatctgccagcggacacttggagcgctttgagggctatggtggagaaggaaatatcttcacataaaaactagaaagaagcattctcagaaacatttatgtgaagcgtgcattcaactcacagagttgaaccttccttttgatacaacagttttgaaacactcttttgaacaattgcaggtgaatctttggagcgctttgaagcctttgttggaaatgggaatatcttcacacacaaaccagccagaaacattctcagaaacttctttgtgatgtgtgcgttgaacccagagagatgaacctttcctttgatagagcagttttgaaacgtgtttttgtaagatcggcaagcggataattggcttcgctttgtgtcctttggtggaaacgcgaatatcttctaataaaaactagacagaaatattctcagaatcttctttgtgatgtgggcattcaacaaacacagttgaacatttcttttcacagagcagttttgaaacactcttttggtagaatctgccagtggatatttggagcgctttgagggctattgtgccaatggaaatatctgcccctaaaaactagacagaagcattctcagaatctacttcgtgatgtttgcattcaacacagagagttgaacatacctcttcacagagcagttttgaaaacctctttctgtagaatctgcaagtggatattcggaccactttgaggccttcataggaaacagtaatatcttcacataaaaactagatagaagcattgtcagaaagttctttgtgatgtgtgaattcaactcacagagttgaaccttcctttaatagagcagttttgaaacactctttttctagaatctgcaagtagatatttggagcgctttgaggccttcgttggaaaccggaacatcttcacataaaaagtagatagaggcattctcagaaaattttgtgatatgtagattcatctgacagcgttgaacctttcttttgatagagcagttttcaaaaactcttttgtcgaatctgcaagtagacatttggagtgctttgagggctgtggtgccaaaggaaatgtcttcccatagaaactagaatgaagcattctcagcaacttctttgtgacgtttgcattcatctcacagtgttgaacatacctttccatagagtagttttgaagcactatttttgtagaatctgccagtggatatttggactgctttgaggccttcatcggaaacgggaatatcttcacataaacactagacagaagcattctcagaaacttcttggtgatctgtccattcaactcacagagttgaaccttcctttttatggagcagttttgaaacattgtttttggaggatctgcaagtggatatttagagcgctttgaggcctatggtagaaaacgaaatatctgcctataacaactagacagaagcattctgagaaacttctttgtgatgtttgcattcaactaccagagttgaaccttccttttgatagggcagtttggaaacactctttttgtagaatctgcatgtggatatctggagcgatttgaggcctacggtccaaaaggaaatatcttcctgggaaaaatagacgaaagcattctcagaaagtgctttgtgatatgtgcattcgactcaccgagttgaaacttttttttgatagagcagttttgaaacactctgtagaatctgaaagtggatatttggagctctttgagggctatggcggcaaagaaactatattcacattaaagtagacagcagcattcccagaaacttctttaggatgtttgcagtaaactcacaggagttgaacacacctttccgtagagcagctttgaaacactctgtgtgtgggatccgcaagtggatatttggaccgctttgagacctttgctggaaacgggaatatcttcacatataaactggacagaagcattctcagaaacttcttcgtgatgtgtgcattctactcccaaatttgaattttccttttcatgaagcagttttggaacactctatttgtgcaatctacaattggataattggaacgctttgatgcccatggtagaaaaggaaatatcctcatataaaaactagacagaaggattcacagaaaatgctttgtgatgtgtgcattcaaatcatgcagttgaatctttcttttgttagagcagttttgaaacactgtttctgtggaatctgccagcggacacttggagcgctttgagggctatggtggagaaggaaatatcttcacataaaaactagaaagaagcattctgagaaccatttatgtgaagcgtgcgttccactcacagagttgaaccttccttttgatagaacagttttgaaacactcttttgaacaattgcaggtgaatatttggagggcttttaagcctttgttggaaatgggaatatcttcacacacaaactagccagaagcattctcagaaacttctttgtgatgtgtgcgttaaacccagagagatgaacctttcctttgatagagcagttttgaaacgtgtttttgtaatatcggcaagcggataattggcttcgctttgtgtcctttggtggaaacgggaatatcttctaataaaaactagacagaaatattctcagaatcttctttgtgatgtgggcattcaacaaacacagttgaacatttcttttcacagagcagttttgaaacactcttttggtagaatctgccagtggatatttggagcgctttgaaggctattgtgccaatggaaatatcttcccctaaaaactagacagaagcattctcagaaactacttcatgatgtttgcattcaacacacacagttgaacatacctcttcacagagcagttttgaaaacctctttctgtagaatctgtaagtggatattgggaccactttgaggccttcataggaaacagtaatatcttcacataaaaactagatggaagcattctcagaaagttctttgtgatgtgtgaattcaactcacagagttgaaccttccttcaatagagcagttttgaaacactctttttctagaatctgcaagtagatatttggagcgcgttgaggccttcgttggaaaccggaatatcttcacaggaaaagtagatagaggcattctcagaaacttttttgtgatatgtagattcaactcacagcgttgaacctttctttggatggagcagttttgaaaaacccttttatcgaatctgcaggtagacattcggggtgctttgagggctgtggtgcaaaaggaaatgtcttcccatagaaactagactgaagcattctcagcaacttcttggtgacgtttgcattcatctcacagtgttgaacatacctttccatagagtgattttgaaacactgtttttgtagaatcggcaagtggatatttggactgctttgaggccttcatcggaaacgggaatatcttcacataaacactacagagaagcaatctcagaaacttctttgtggtctgtccattcaaatcacagagttgaaccttcctttttatggagcagttttggaaccctgtttttggagaatctgcaagtggatatttggagcgctttgaggcctatggtagaaaaagaaatatctgcctatgacaactagacagaagcattctgagaaacttctttgtgatgtttgcattcaactaccagaggtgaaccttccttttgatagggcagtttggaaacactctttttgcagaatctgcatgtggatatctggagcgatttgaggcctacggtccaaaaggaaatatcttcctgggaaaaatagacgaaagcattctcagaaactgctttgtgatatgtgcattcgactcaccgagttgaaactttttttggatagagcagttttgaaacactctgtagaatctgaaagtggatatttggagctactttgagggctatggcggaaaagaaaatatattcacattaaactagacagcagcattcccagaaacttctttaggatgtttgcagtaaactcacagagttgaacatacctttccgtagagcagctttgaaacactctgtgtgtgggatccgcaagtggatatttggaccgctttgagacctttgctggaaatgggaatatcttcacatataaactggacagaagcattctcagaaacttcttcgtgatgtgtgcattctcctcccgaatttgaatcttccttttcatgaagcagttttgaaacactctgtttgtgcagtccacaattggataattggaacgctttgatgtccaaggtagaaaaggaaatatcctcatataaaaactagacagaaggattcacagaaaatgctttgtgatgtgtgcattcaaatcacggagttgaatctttcttttgttagagcagttttgaaacactgtttctgtggaatatgccagcggacacttggagcgctttgagggctacggtggagaaggaaatatcttcacataaaaactagaaagaagcattctcagaaccatttatgtgaagcgtgcattcaactcacagagttgaaccttccttttgatagaacagttttgaaacactcttttgaacaattgcaggtgaatatttggagggctttgaagcctttgttggaaacgggaatatcttcacacacgaactagccagaagcattctcagaaacttctttgtgatgtgtgcgttgaacccagagagatgaacctttcctttgatagagcagttttgaagcgtgtttttgtaagatcggcaagcggataattggcttcgctttgtgtcccttggtggaaacgggaatatcttctaataaaaactagacagagatattctcagaaacttctttgtgatgtgggcattcaactgacacagtcgaacatttcttttcacagagcagttttgaaacactcttttggtcgaatctgccagtggatatttggagcgctttgagggctattgtgccaatggaaatatctgcccctaaaaactagacagaagcattctcagaaactgcttcgggatgtttgcattcaactcacagagttgaatatacctctgcatagagcagttttgaaaacctctttttgtagaatctgcatgtggatattcggaccactttgaggccttcatgggaaacagtaatatcttcacataaaaactagatagaagcattgtcagaaagttctttgtgatgtgtgaattcaactcacagagttgaaccttcctttaatagagcagttttgaaacactctttttctagaatctgcaagtagatatttggagcgctttgaggccttcgttggaaaccggaatatcttcacaggaaaagaagatagaggcattctcagaaacttttttgtgatatgtagattcaactcacagcgttgaacctttctttggatggagcagttttgaaaaactcttttatcgaatctgcaggtagacatttggggtgctttgagggctgtggtgcaaaagaaaatgtcttcccatagaaactagactgaagcattctcagcaacttctttgtgacgtttgcattcatctcacagtgttgaacatacctttccatagagtagttttcagacactatttttgtagaatctgcaagcggatatttggactgctttgaggccttcatcggagacgggaatatcttcacataaacactaggcagaagcattctcagaaacttctttgtgatctgtccattcaactcacagagttgaaccttcctttttatggagcagttttgaatcactgtttttggggaatctgcaagtggatatttcgagcgctttgaggcctatggtagaaaaagaaatatctgcctctaaaaaccagacagaagcattccgagaaacttctctgtgatgtttgcattcaactagcagagttgaaccttcctcttgatagggcagtttggaaacactctttttgtagaatctgcatgtggatatctggagcggtttgaggcctacggtcaaaaaggaaatatcttcctgggaaaaatagacgaaagcattctcagaaactgctttgtgacatgtgcattcgactcaccgtgttgaaactgtttttcgatagagcagttttgaaacactctgtagaatctgaaagtggatatttggagctctttgagggctatggcggaaaagaaaatatattcacattaaagtagacagcagcattctcagaaacttctttaggatgtttgcagtaaactcacagagttgaacatacctttccgttaagcagttttgaaacactctgtttgtgggatccgcaagtggatatttggaccgctttgagacctttgctggaaatgggaatatcttcacatataaactagacagaagcattctcagaaacttcttcgtgatgtgtgcattctactcccgaatttgaatcttccttttcatgaagcagttttgaaacactctgtttgtgcaatccacaattggataattggaacgctttgatacccatggtagaaaaggaaatagcctcatataaaaactagacagaaggattcacagaaaatgctttgtgatgtgtgcattcaaatcacgcagttgaatctttcttttgttagagcagttttgaaacactgtttctgtggaatctgccagcggacacttggagcgctttgagggctatggtggagaaggaaacatcttcccataaaaactagaaagaagcattctcggaaacatttatgtgaagcgtgcattcaactcacagagttgaaccttccttttgatggaacagttttgaaacactcttttgaacaattgcaggtgaatctttggagcgctttgaagcctttgttggaaatgggaatatcttcacacacaaactaggcagaagcattctcagaaacttctttgtgatgtgtgcgttgaacccagagagatgaacctttcctttgatagagcagttttgaaacgtgtttttgtaaggtcggcaagcggataattggcttcgcttagtgtcctttggtggaaacgggaatatcttctaataaaaactagacagaaatattctcagaatcttctttgtgatgtgggcattcaactaacagagttgaacgtttcttttcacagagcagttttgaaacactcttttggtagaatctgccagtggatatttggagcgctttgagggctattgtgccaacggaaatatctgcccctaaaaactagacagaagcattctcagaaactacttcgtgatgtttgcattcaacacacagagttgaacatacctcttcacagagcggttttgaaaaactctttctgtagaatctgcaagtggatattcggaccactttgaggccttcataggaaacagtaatatcttcacataaaaactagatagaagcattgtcagaaaattccttgtgatgtgtgaattcaactcacagagttgaaccttcctttaatagagcagttttgaaacactcttcttctagaatctgcaagtagatatttggagcgctttgaggccgtcgttggaaaccggaatatcttcacagaaaaagtagatagaggcattctcagaaactcttttgtgatatgttgattcatctgacagcgttgaacctttcttttgatagagcagttttgaaaaactcttttgtcgaatctgcaagtagacatttggagtgctttgagggctgtggtgccaaaggaaatgtcttcccatggaaactagactgaagcattctcagcaacttctttgtgacgtttgcattcatctcacagtgttgaacatacctttccatagagtagttttgagacactatttttgtagaatctgcaagcggatatttggactgctttgaggccttcatcggagacgggaatatcttcacataaacactagacagaagcattctcagaaacctctttgtggtctgtccattcaactcacagagttgaaccttcctttttatggagcagttttgaaaccctgtttttggagaatctgcaagtggatatttggagcgctttgaggcctatggtagaaaaagaaatatctacctatgacaactagacagaagcattctcagaaactgctttgtgatatgtgcattcgactcaccgagttgaaacttttttttgattgagcagttttgaaacactctgtagaatctgaaagtggatatttggagctctttgagggctatggcggaaaacaaaatatattcacattaaagtagacagcagcattctcagaaacttctttaggatgtttgcagtaaactcacagagttaaacatatctttccgtagagcagttttgaaacactctgtttgtgggatccgcaagtggatatttgggcccctttgagacctttgctagaaatgggaatatcttcacatataaactagacagaagcattctcagaaacttcttcgtgatgtgtgcattgtactcccaaatttgaatcttccttctcatggagcagttttgaaacactctgtttgtgcaatctaccattggagaattggaacgcttggatgcccgtggtagaaaaggaaatatcctcatataaaaactagacagaaggattcacagaaaatgctttgtgatgtgtgcattcaaatcacggagttgaatctttcttttgtcagagcagttttgaaacactgtttctgtggaatctgccagcggatacttggagcgctttgagggctgtggtggagaaggaaatatcttcccataaaaactagaaagaagcattctcagaaacatttatgtgaagcgtgcattcaacttacagagttgaaccttccttttgatacaacagttttgaaacactcttttgaacaattgcaggtgaatctttggagcgctttgaagcctttgttggaaatgggaatatcttcacacacaaactagccagaagcattctcagaaacttctttgtgatgtgtgcgttgaacccagagagatgaacctttccttcgatagagcagttttgaaacgtgtttttgtaagatctgcaagcggataattggcttcgctttgtgtcctttggtggaaacgggaatatcttctaataaaaactagacagaaatattctcagaatcttctttgtgatgtgggcaatcaactaacacagttgaacgtttcttttcacagagcagttttgaaacactcttttggtagaatctgccagtggatatttggagcgctttgagggctattgtgccaacggaaatatctgcccctaaaaactagacagaagcattctcagaaactacttcgtgatgtttgcattcaacacacagagttgaacatacctcttcacagagcagttttgaaaaactctttctgtagaatctgcaagtggatattcggaccactttgaggccttcataggaaacagtaatatcttcacataaaaactagatagaagcattgtcagaaagttctttgtgatgtgtgaattcaactcacagagttgaaccttcctttaatagagcagttttgaaacactctttttctagaatctgcaagtagatatttggagcgctttgaggccttcgttggaaactggaatatcttcacataaaaagtagatagaggcattctcagaaacttttttgtgatatgttgattcatctgacagcgttgaacctttcttttgatagagcagttttgaaaaactcttttgtcgaatctgcaagtagacatgtggagtgctttgagggctgtggtgccaaaggaaatgtcttcccatggaaactagactgaagcattctcagcaacttcttggtgacgtttgcattcatctcacagtgttgaacatacctatccatagagtggttttgaaacactgtttttgtagaatcggcaagtggatatttggactgctttgaggccttcatcggaaacgggaatatcttcacataaacactagagagaagcattctcagaaacttctttgtcatctgtccattcaactcacagaggtgaaccttcctttttatggagcagttttgaaacactgtttttggagaatctgcaagtggatatttggagcgctttgaggcctatggtagaaaaagaaatatctgcctctaaaaaccagacagaagcattctgagaaacttctttgtgatgtttgcattcaactaccagagttgaatcttccttttgatagggcagtttggaaacactctgtttgtagaatctgcatgtggatatctggagcgatttgaggcctatggtcaaaaaggaaatatcttcctgggaaaaatagacgaaagcattctcagaaactgctttgtgatatgtgcattcgactcaccgagctgaaacttttttttgatagagcagttttgaaacactctgtagaatctgaaagtggatatttggagctctttgagggctatggcggaaaagaaaatatattcacattaaactagacagcagcattctcagaaacttctttaggatatttgcagtaaactcacagagttgaacatacctttccgaagagcagttttgaaacactctgtttgtgggatccgcaagtggatatttggaccgctttgagacctttgctggaaatgggaatatcctcacatataaactagacagaagcattctcagaaacttcttcgtgatgtgtgcattctactcccaaatttgaatcttccttttcatgaagcagttttgaaacactctatttgtgcattctacaattggatgattggaacgctttgatgcccatggtggaaaaggaaatatcctcatataaaaactagacagaaggattcacagaaaatgctttgtgatgtgtgcattcaaatcacggagttgaatctttcttttgttagagcagttttgaaacactgtttctgtggaatctgccagcggacacttggagcgctttgagggctacggtggagaaggaaatatcttcacataaaaactaaaaagaagcattctcagaaacatttatgtgaagcgtgcattcaactcacagagttgaaccttcctttggatacaacagttttgaaacactcttttgaacaattgcaggtgaatctttggagcgctttgaagcccttgttggaattgggaatatcttcacacacaaactagccagaagcattctcagaaacttctttgtgatgtgtgcgttgaacccagagagatgaacctttccttggatagagcagttttgaaacgtgtttttgtaaggtctgcaagcggataattggcttcgctttgtgtcctttggtggaaacgggaatatcttctaataaaaactagacagaaatattctcagaatctcctttgtgatgtgggcattcaactaacacagttgaacatttcttttcacagagcagttttgaaacactcttttggtagaatctgccagtggatatttggagagcttggagggctgttgtgccaatggaaatatctgcccctaaaatctagacagaaagcattctcagaaactactttgtgatgtttgcattcaactcacagagttgaacatacctcttcatagagcagttttgaaaacctctttttgtagaatctgcaagtggatattcggaccactttgaggccttcataggaaacagtaataccttcacataaaaactagatagaagcattgtcagaaagttctttgtgatgtgtgaattcaactcacagagttggaccttcctttaatagagcagttttgaaacactctttttctagaatctgcaagtggatatttggagcgctttgaggccttcgttggaaaccggaatatcttcacaggaaaagtagatagaggcattctcagaaacttttctgtgatatgtagattcaactcacagcgttgaacctttctttggatggagcagttttgaaaaacccttttatcgaatctgcaggtagacatttggggtgctttgagggctgtggtgcaaaaggtaatgtcttcccatagaaactagactgaagcattctcagcaacttcttggtgacgtttgcattcatctcacagtgttgaacatacctctccatagagtggttttgaaacactctttttgtagaatcggcaagtggatatttggactgctttgaggccttcatcggaaacgggaatatcttcacataaacactagagagaagcattctcagaaacttctttgtggtctgtccattcaactcacagagttgaaccttcctttttatggagcagttttgaaaccctgtttttggagaatctgcaagtggatatttggagcgctttgaggcctatggtagaaaaagaaatatctgcctatgacaactagacagaagcattctgagaaacttctttgtgatgtttgcattcaactaccagagttgaaccttccttttgatagggcagtttggaaacactctctttgtagaatctgcatgtggatatctggagcgatttgaggcctacggtccgaaaggaaatatcttcctgggaaaaatagacgaaagcattctcagaaactgctttgtgatatgtgcattcgactcaccgagttgaaacttttcttggatagagcagttttgaaacactctgtagaatctgaaagtggatatttggagctctttgagggctatggcggaaaagaaaatatattcacattaaactagacagcagcattctcagaaacttctttaggatgtttgcagtaaactcacagatttgaacatacctttccgtagagcagttttgaaacactctatttgtgggatccgcaagtggatatttggaccgctttgagacctttgctggaaatgggaatatcttcacgtataaactagacagaagcattctcagaaacttcttcatgatgtgtgcattctactcccaaatttgaatcttccttttcatgaagcagttttgaaacactcggtttgtgcaatccacaattggataattggaacgctttgatgcccatggtagaaaaggaaatatcctcatataaaaactagacagaaggattcacagaaaatgctttgtgatgtgtgcattcaaatcacggagttgaatctttcttttgtgagagcagttttgaaacactgtttctgtggaatctgccagcggacacttggagcgctttgagggctatggtggagaaggaaatatcttcccataaaaactagaaagaagcattctcagaaacatctatgtgaagtgtgcattcaactcacagatttgaaccttcctttttcatagaacagttttgaaacactcttttgtacaattttaggtgaatatttggagctctttgaagcctttgttggaattgggaatatcttcacatacaaactagccagaagcattctcagaaacttctttgtgatgtgtgcgttgaactcagagagatgaacctttcctttgatagagcagttttgaaacgtgtttctgtaagatctgtatgtggatatttggggcgctttgagtcctttggtggaaacgggaatatcttctaataaaaactagacagagatattctcagaaacttctttgtgatgtgggcattcaactgacacagtcgaacgtttcttttcacagagcagttttgaaacactcttttggtcgaatctgccagtggatatttggagcgctttgagggctattgtgccaatggaaatatctgcccctaaaaactagacagaagcattctcagaaacttctttgtgatgtttgcattcaaataccagagttgaacctccctcttcatagagcagttttgaaatcctctttttgtagaatctgcaagtggatatttggaccactttgaggccttcataggaaacagtactatcttcacataaaaactagatagaagcattgtcagaaagttctttgtgatgtgtgaattcaactcacagagttgaaccttcctttaatagagcagttttgaaacgctctttttctagaatctgccagtagatatttggagcgctttgaggccttcgttggaaacaggaatatcttcacataaaaagtagatagaggcattctcagaaacttttttgtgatatgtagattccactcacagcgttgaacctttcttttgatagagcagttttgaaaaattcttttatcgaatctgcaagtagacatttggggtgctttgagggctgtggtgcaaaaggaaatgtcttcccatggaaactagactgaagcattctcagcaacttctttgtgacgtttgcattcatctcacagtgttgaacatacctttccatagagtagttttgaagcactatttttgtagaatctgcaagtggatatttggactgctttgaggccttcatcggagacgggaatatcttcacataaacactagacagaagcattctcagaaacttctttgtgatctgtccattcaactcacagagttgaaccttcctttttatggagcagttttgaaacactgtttttggagaatcttcaagtagatatttggagcgctttgtggcctatgttagaaaaagaaatatctgcctataacaactagacagaagcattctgagaaacttctttgtgatgtttgcattcaactaccttagttgaaccttccttttgatagggcagtttggaaacactctttttgtagaatctgcatgtggatatctggagcgatttgaggcctatggtcaaaaaggaaatatcttcctgggaaaaatagacgaaagcattctcagaaactgctttgtgatatgtgcattcgactcaccgatttgaaacttttttttgatagagcagttttgaaacactctgtagaaactgaaagtggatattaggagctctttgagggttatggcggaaaagaaaatatattcacattaaactagacagcagcattcccagaaacttctttaggatgtttgcagtaaactcacagagttgaacatacctttccgtagagcagttttgaaacactctgtttgtgggatccgcaagtggatatttggaccgctttgagacctttgctggaaacgggaatatgttcacatataaactagacagaagcattctcagaaacttcttcgtgatgtatgcattctactccctaatttgaatcttccttttcatgaagcagttttgaaacactctatttgtgcattctacaattggatgattggaacgctttgatgcccatggtagaaaaggaaatatcctcatataaaaactagacagaaggattcacagaaaatgctttgtgatgtgtgcattcaaaccacggagttgaatctttcttttgttagagcagttttgaaacactgtttctgtggaatctgccagcggacacttggagcgctttgagggctatggtggagaaggaaacatcttcccataaaaactagaaagaagcattctgagaaccatttatgtgaagcgtgcattcaactcacagagttgaaccttccttttgatagaacagttttgaaacactcttttgaacaattgcaggtgaatatttggagggctttgaagcctttgttggaaatgggaatatcttcacacacaaactagccagaagcattctcagaaacttctttgtgatgtgtgcgttgaatccagagagatgaacctttcctttgatagagcagttttgaaacgtgtttttgtaagatctgcaaacggataattgacttcgccttgtgtcctttggtggaaacgggaatatcttctaataaaaactagacagaaatattctcagaatctcctttgtgatgtgggcattcaactaacgcagttgaacatttcttttcacagagcagttttgaaacactcttttggtagaatctgccagtggatatttggagcgctttgagggctgttgtgccaatggaaatatctgcccctaaaatctagacagaagcattctcagaaactacttcgtgatgtttgcattcaactcacagagttgaacatacctcttcacagagcagttttgaaaacctccttttgtagaatctgcaagtggatattcggagcactttgaggccttcataggaaacagtaatatcttcgcataaaaactagatagaagcattgtcagaaagttctttgtgatgtgtgaattcaactcacagagttgaaccttcctttaatagagcagttttgaaacactctttttttagaatctgcaagtagatatttcgagcgctttgaggccttcgttggaaaccggaatatcttcacaggaaaagtagatagaggcattctcagaaacttttttgtgatatgttgattcatctgacagcgttgaacctttcttttgatagagcagttttgaaaaactcttttgtcgaatctgcaagtagacatttggagtgctttgagggctgtggtgccaaaggaaatgtcttcccatggaaactagactgaagcattctcagcaacttcttggtgacgtttgcattcatctcacagtgttgaacatacctttccatagagtggttttgaaacactgtttttgtagaatcggcaagtggatatttggactgctttgaggccttcgtcggaaacgggaatatcttcacataaacactagagagaagcattctcagaaacttctttgtcatctgtccattcaactcacagaagttgaaccttcctttttatggagcagttttgaaacactccttttggagaatctgcaagtggatatttggagcgctttgaggcctatggtagaaaaagaaatatctgcctctaaaaaccagacagaaagcattctgagaaacttctttgtgatgtttgccttcaactaccagagttgaaccttccttttgatagggcagtttggaaacactctttttgtagaatctgcatgtggatatctggagcgatttgaggcctacggtccaaaaggaaatatcttcctgggaaagatagacgaagcattctcagaaactgctttgtgatatgtgcattcgactctccgagttgaaacttttttcggatagagcagttttgaaacactctgtagaatctgaaagtggatatttggagctctttgagggctatggcggaaaagaaaagatattcacattaaactagacagcagcattcccagaaacttctttaggatgtttgcagtaaactcacagagttgaacacacctttccgtagagcagttttgaaacactctgtttgtgggatccgcaagtggatatttggaccgctttgagacctttgctggaaacgggaatatcttcacatataaactggacagaagcattctcagaaacttcttcgtgatgtgtgcattctactcccaaatttgaatcttccttttcatgaagcagttttgaaacaatctgtttgtgcaatccacaattggataattggaacgctttgatgcccatggtagaaaaggaaatatcctcatataaaaactagacagaaggatccacagaaaatgctttgtgatgtgtgcattcaaatcacggagttgaatctttcttttgtcagagcagttttgaaacactgtttctgtggaatctgccagcggacacttggagcgctttgagggctatggtggagaaggaaatatcttcccataaaaactagagagaagcattctcagaaccatttatgtgaagcgtgcgttcaactcacggagttgaaccttccttttgatagaacagttttgaaacactcttttgaacaattgcaggtgaatatttggagggctttgaagcctttgttggaaatgggaatatcttcacacacaaactagccagaagcattctcagaaacttctttgtgatgtgtgcgttgaacccagagagatgaacctttcctttgatagagcagttttgaaacgtgtttttgtaagatctgcaagcggatagttggcttcgctgtgtgtcctttggtggaaacgggaatatcttctaataaaaactagacagaaatattctcagaatcttcttcgtgatgtgggcattcaactaacacagttgaaccttacttttcacagagcagttttgaaacacccttttggtagaatctgccagtggatatttggagcgctttgagggctattgtgccaacggaaatatctgcccctaaaaactagacagaagcatgctcagaaactgctttgtgatgtttgcattcaactcacagagttgaacataccttttcatagagcagttttgaaaacctctttttgtagaatctgcaagaggatattcggaccactatgaggccttcataggaaacagtaatatcttcacgtaaaaactagatagaaacattgtcagaaagttctttgtgatgtgtgaattcaactcacagagttgaaccttcctttaatagagcagttttgaaacactctttttctagaatccgccagtagatatttggagcgctttgaggccttcgttggaaaccggaatatctccacataaaaagtagatagaggcattctcagaaacttttttgtgatatgtagattcaactcacagcgttgaacctttctttggatggagcagttttgaaaaactcttttatcgaatctgcaggtagacatttgtggtgctttgagggctgtggtgcaaaaggaaatgtcttcccatagaaactagactgaagcattctcagcaacttcttggtgacgtttgcattcatctcacagtgtttaacatacctttccatagagtagttttgaaacactgtttttgtagaatcggcaagtggatatttggactgctttgaggccttcatcggaaacgggaatatcttcacataaacactagagagaagcattctcagaaacttctttgtgatctgtccattcaactcacagagttgaaccttcctttttatggagcagttttgaaacactgtttttggagaatctgcaagtagatatttggagcgctttgtggcctatggtagaaaaagaaatatctgcctataacaactagacagaagcattctgagaaacttctttgtgatgtttgcattcaactaccagaggtgaaccttccttttgatagggcagtttggaaacactcatttggagaatctgcatgtggatatctggagcgatttgaggcctactgtccaaaaggaaatatcttcctgggaaaaatagacgaaagcattctcagaaactgctttgtgatatgtgcattcgactcaccgagttgaaacttttatttgatagagcagttttgaaacactctgtagaatctgaaagtggatatttggagctctttgagggctatggcggaaaagaaaatatattcacattaaactagacagcagcattctcagaaacttctttaggatgtctgcagtaaactcacagagttgaacatacctttccgtagagcagttttgaaacactctgtttgtgggatccgcaagtggatatttggacctctttgagatctttgctggaaatgggaatatcttcacatataaactagacagaagcattctcaaaaacttcttcgtgatgtgtgcattgttctcccaaatttgaatcttccttctcatggagcagttttgaaacactctgtttgtgcaatctacaattggagaattggaacgcttggatgcccgtggtagaaaaggaaatatcctcatataaaaactagacagaaggattcacagaaaatgctttgtgatgtgtgcattcaaatcacggagttgaatctttcttttgtcagagcagttttgaaacactgtttctgtggaatctgccagcggacacttggagcgctttgagggctatggtggagaaggaaatatcttcccataaaaactagagagaagcattctcagaaacatgtatgtgaagcgtgaattcaactcacagtgttgaaccttccttttgatagaacagtttttaaacactcttttgaacaattgcaggtgaatctttggagcgctttgaagcctttgttggaaatgggaatatcttcacacacaaactagccagaagcattctcagaaacttctttgtgatgcgtacgttgaacacagagagatgaacctttcctttgatagagcagttttgaaacgtgtttttgtaagatctgcaagcggataatcggcttcgctttgtgtcctttggtggaaacgggaatatcttctaataaaaactagacagaaatattctcagaatctcctttgtgatgtgggcattcaactaacacagttgaactttcttttcacagagcagtttagaaacactcttttggtagaatctgccagtggatatttggagcgctttgagggctattgtgccaatggaaatatctgcccctgaaatctagacagaagcattctcagaaactacttcgtgatgtttgcattcaactcacagagttgaacatacctcttcatagagcagttttgaaaacctctttttgtagaatctgcaagaggatattcggaccactttgaggccttcataggaaacagtaatatcttcgcataaaaactagatagaagcattgtcaggaagttctttgtgatgtgtgaattcaactcacagagttgaaacttcctttaatagagcagtgttgaaacactctttttctagaatctgcaagtagatatttggagcgcttggaggccttcgttgtaaaccggaatatcttcacaggaaatgtagatagaggcattctcagaaacttttttgtgatatgtagattcaactcacagcgttgaacctttctttggatggagcagttttgaaaaactcttttatcgaatctgcaggtagacattcggggtgctttgagggctgtgctgcaaaaggaaatgtcttcccatagaaactagactgaagcattctcagcaacttcttggtgacgtttgcattcatctcacagtgttgaacatacctttccatagagtagttttgaaacactgtttgtgtagaatcggcaagtggatatttggactgctttgaggccttcatcggaaacgggaatatcttcacataaacactagagagaagcattctcagaaacttctttgtggtctgtgcattcaactcacagagttgaaccttcctttttatggagcagttttgaaaccctgttttcggagaatctgcaagtggatatttggagcgctttgaggcctatggtagaaaaagaaatatctgcctatgacagatagacagaagcattccgagaaaagttctttgtgatgtttgcattcaactagcagagttgaaccttccttttgatagggcagtttggaaacactctttttgtagaatcttcatgtggatatctggagcggtttgaggcctacggtcaaaaaggaaatatcttcctgggaaaaatagacgaaagcattctcagaaactgctttgtgatatgtgcattcgactcaccgagttgaaacttttttttgatagagcagttttggaacactctgtagaatctgaaagtgtatatttggagctctttgagggctatggcggaaaagaaaatatattcacattaaactagacagcagcattctcagaaacttctttaggatgtttgtagtaaactcacagagttgaacatacctttccgtagagcagttttgaaacactctgtttgtgggatccgcaaggggatatttggaccgctttgagacctttgctggaaatgggaatatcttcacatataaactagacagaagcattctcagaaacttcttcgtgatgtgtgcattgtactcccaaatttgaatcttccttctcatggagcagttttgaaacactctgtttgtgcaatctacaattggagaattggaaggcttggatgcccatggtagaaaaggaaatatcctcatataaaaactagacagaaggattcacagaaaatgctttgtgatgtgtgcattcaaatcacggagttgaatctttcttttgttagagcagttttgaaacactgtttctgtggaatctgccagcggacacttggagcgctttgagggctatggtggagaaggaaatatcttcacataaaaactagaaagaagcattctcagaaacatttatgtgaagcgtgcgttcaactcacagagttgaaccttccttttgatagaacaggtttgaaacactcttttgaacaattgcaggtgaatatttggagggctttgaagcctttgttggaaatgggaatatcttcacacacaaactagccagaagcattctcagaaacttctttgtgatgtgtgcattgaacccagagagatgaacctttcctttgatagagcagttttgaaacgtgtttttgtaagatctgcaagcggataattggcttcgctttgtgtcctttggtggaaacgggaatatcttctaataaaaactagacagaaatattctcaaaatctcctttgtgatgtgggcattcaactaacacagttgaacatttcttttcacagagcagttttgaaacactcttttggtagaatctgccagtggatatttggagcgcttggagggctattgtgccaatggtaatatctgcccctgaaaactagacagaagcattctcagaaactgctttgtgatgtttgcattcaactcacagagttgaacctacctcttgatagagcagtttggaaaacctcttcttgtagaatctgcaagtggatattcggaccactttgaggccttcataggaaacaataatatcttcacataaaaactagatagaagcattgtcagaaagttctttgtgatgtgtgaattcaactcacagagttgaaccttcctttaatagagcagttttgaaacactctttttctagaatctgcaagtagatatttggagccctttgaggccttctttggaaaccggaatatcttcacataaaaagtagatagaggcattctcagaaacttttttgtgaaatgtagattcaactcacagcgttgaacctttctttggatggagcagttttgaaaaacccttttatcgaatctgcaggtagacattcggggtgctttgagggctgtggtgcaaaaggaaatgtcttcccatagaaactagactgaagcattctcagcaacttctttgtgacgtttgcattcatctcacagtgttgaacatacctttccatagagtagttttgagacactatttttgtagaatctgcaagtggatatttggactgctttgaggccttcatcggagacgggaatatcttcacataaacactaggcagaagcattctcagaaacttctttgtgatctgtccattcaactcacagagttgaaccttcctttttatggagcagttttgaaacactgtttgtgaagaatctgcaagtggatatttgcagcgccttgaggccaatggtagaaaaagaaatatctgcctctaaatactagactgaagcattctgagaaacttctttgtgatgtttgctttcagctaccagagttgaaccttccttttgatagggcagtttggaaacactctttttgtagaatctgcatgtggatatctggagcgatttgaggcctacggtcaaaaaggaaatatcttcctgggaaaaatagacgaaagcattctcagaaagtgctttgtgatatgcgcattcgactcaccgagttgaaacttttttttgatagagcagttttgaaacactctgtagaatctgaaagtggatatttggagctctttgagggctatggcggaaaagaaaatatattcacattaaagtagacagcagcattctcagaaacttctttaggatgtttgcagtaaactcacagagttgaacatacctttccgtagagcagttttgaaacactctgtttgtgggatccgcaagtggatatttggaccgctttgagacctttgctggaaatgggaatatctgcacatataaactagacagaagcattctcagaaacttcttcgtgatgtgtgcattctcctcccgaatttgaatcttccttttcatgaagcagttttgaaacactctgtttgtgcaatccacaattggataattggaacgctttgatgcccatggtagaaaaggaaatatcctcatataaaaactagacagaaggattcacagaaaatgctttgtgatgtgtgcattcaaatcacggagttgaatctttcttttgttagagcagttttgaaacactgtttctgtggaatctgccagcggacacttggagcgctttgagggctatggtggagaaggaaatatcttcccataaaaactagacagaagcattctcagaaccatttatgtgaagcgtgcattcaactctcagagttgaaccttccttttgttagaacagttttgaaacactcttttgaacaattgcaggtgaatatttggagcgctttgaagcctttgctggaaatgggaatatcttcacgcacaaagtagccagaagcattctcagaaacttctttgtgatgtgtgcgttgaacccagagagatgaacctttcctttgatagagcagttttgaaacgtgtttttgtaaggtcggcaagcggataattggcttcgctttgtgtcctttggtggaaacgggaatatcttctaataaaaactagacagaaatattctcagaatctcctttgtgatgtgggcattcaactaacacagttgaacatttcttttcacagagcagttttgaaacactcttttggtagaatctgccagtggatatgtggagcgcttggagggctattgtgccaatggaaatatctgcccctgaaaactagacagaagcattctcaaaaactgctttgtgatgtttgcattcaactcacagagttgaacatacctcttcatagagcagttttgaaaacctctttttgtagaatctgcaagtggatattcggaccactttgaggccttcatcggaaacagtaatatcatcacataaaaactagatagaagcattgtcagaaagttctttgtgatgtgtgaattcaactcacatagttgaaccttcctttaatagagcagttttaaacactctttttctagaatctgccagtagatatttggagcgctttgaggccttcgttggaaaccggaatatcttcacataaaaagtagatagaggcattctcagaaacttttctgtgatatgtagattcaactcacagcgttgaacctttcttttgatagagcggttttgaaaaactcttatgtcgaatctgcaagtagacatttggagtgctttgagggctgtggtgcaaaaggaaatgtcttcccatagaaactagactgaagcattctcagcaacttctttgtgacgtttgcattcatctcacagtgttgaacatacctttccatagagtagttttgaaacactgtttttgtagaatctgcaagtggatatttggactgctttgaggccttcatcggaaacgggaatatcttcacataaacactagagagaagcattatcagaaacttctttgtggtctgtccattcaactcacagagttgaaccttcctttttatggagcagttttgaaacactgttttcggagaatctgcaagtggatatttggagcgctttgaggcctatggtagaaaaagaaatatctgcctatgacaactagacagaagcattctgagaaacttctttgtgatgtttgcattcaactaccagaggtgaaccttccttttcatagggcagtttggaaacactctttttgtagaatctgcatgtggatatctggagcgatttgaggcctacggtccaaaaggaaatatcttccggggaaaaatagacgaaagcattctcagaaactgctttgtgatatgtgcattcgactctccgagttgaaactttttttggatagagcagttttgaaacactctgtaggatctgaaagtggatatttggagctctttgagggctatggcggaaaagaaaatatattcacattaaactagacagcagcattctcagaaacttctttaggatgtttgtagtaaactcacagagttgaacatacctttccgtagagcagttttgaaacactctgtttgtgggatccgcaagtggatatttggaccgctttgagacctttgctggaaatgggaatatcttcacatataaactagacagaagcattctcagaaacttcttcgtgatgtgtgcattctactcccaaatttgaatcttccttctcatgaagcagttttgaaacactctatttgtgcaatctacaattggataattggaaccctttgatgcccatggtagaaaaggaaatatcctcatatgaaaactagacagaaggattcacagaaaatgctttgtgatgtgtgcattcaaatcacggagttgaatctttcttttgttagagcagttttgaaacacagtttctgtggaatctgccagcggacacttggagcgctttgagggctacggtggagaaggaaatatcttcacataaaaactagaaagaagcattctcagaaacatttatgtgaagcgtgcattcaactcacagagttgaaccttccttttgatacaacagttttgaaacactctttggaacaattgcaggtgaatctttggagcgctttgaagcctttgttgcaaatgggaatatcttcacacacaaactagccagaagcattctcagaaacttctttgtgatgtgtgcgttgtacccagagagatgaacctttccttcgatagagcagttttgaaacgtgtttttgtaagatcggcaagcggataattggcttcgctttgtgtcctttggtggaaacgggaatatcttctaataaaaactagacagagatattctcagaaacttctttgtgatgtgggcattcaagtaacacagttgaacatttcttttcacagagcagttttgaaacactcttttggtcgaatctgccagtggatatttggagtgctttgagggctattgtgccaatggaaatatctgcccctaaaaactagacagaagcattctcagaaactgcttcgtgatgtttgcattcaacacacagagttgaacatacctcttcacagagcagttttgaaaacctctttctgtagaatctgcaagtggatattcggaccactttgaggccttcataggaaacagtaatatcttcacataaaaactagatagaagcattgtcagaaagttctttgtgatgtgtgaattcaactcacagaattgaaccttccttcagcagagcagttgtgaaacactctttttctagaatctgcaagtagatatttggagcgctttgaggccttcgttggaaaccggaatatcttcacaggaaaagtagatagaggcattctcagaaacttttttgtgatatgtagattcaactcacagcgttgaacctttctttggatggagcagttttgaaaaattctttaatcgaatctgcaggtagacatttggggtgctttgagggctgtggtgcaaaaggaaatgtcttcccatagaaactagactgaagcattctcagcaacttctttgtgacgtttgcattcatctcacagtgttgtacatacctttccatcgagtacttttgaaacactgtttttgtagaatctgcaagtggatatttggactgctttgaggccttcatcggaaacgggaatatcttcacataaacactagagagaagcattctcagaaacttctttgtcatctgtccattcaactcacagagttgaaccttcctttttatggagcagttttgaaacactccttttggagaatctgcaagtggatatttggagcactttgaggcctatggtagaaaaagaaatatctgcctctaaaaaccagacagaagcattccgagaaactcctttgtgatgtttgcattcaactagcagagttgaaccttccttttgatagggcagtttggaaacactctttttgtagaatctgcatgtggatatctggagcggtttgaggcctacggtcaaaaaggaaatatcttcctgggaaaaatagacgaaagcattctcagaaactgctttgtgatatgtgcattcgactcaccgagttgaaacttttttttgatagagcagttttgaaacactctgtagaatctgaaagtggatatttggagctctttgagggctatggcggaaaagaaaatatattcacattaaagtagacagcagcattctcagaaacttctttaggatgtctgcagtaaactcacagagttgaacatacctttccatagagcagttttgaaacactctgtttgtgggatccgcaagtggatatttggacagctttgagatctttgctggaaatgggaatatcttcacatataaactagacagaagcattctcagaaacttcttcgtgatgtgtgcattctactcccaaatttgaatcttccttctcatgaagcagtttggaaacactctatttgtgcaatctacaattggataattggaaccctttgatgcccatggtagaaaaggaaatatcctcatataaaaactagacagaaggattcacagaaaatgctttgtgatgtgttcattcaaatcacggtgttgaatcttattttgttagagcagttttgaaacactgtttctgtggaatctgcccgcggacacttggagcgctttgagggctatggtggagaaggaaatatcttcacataaaaactagaaagaagaattctcggaaacatttatgtgaagcgtgcattcaactcacagagttgaacctttcttttgatagaacagttttgaaacactcttttgaacaattgcaggtgaatctttggagcgctttgaagcctttgttggaaatgggaatatcttcacacacaaactagccagaagcattctcagaaacttctttgtgatgtgtgcgttgaacccagagagatgaacctttccttcgatagagcagttttgaaacgtgtttttgtaagatcggcaagcggataattggcttcgctttgtgtcctttggtggaaacgggaatatcttctaataaaaactagacagaaatattctcagaatctcctttgtgatgtgggcattcaactaacacagttgaacatttcttttcacagagcagttttgaaacactcttttggtagaatctgccagtggatatttggagtgtttggagggctattgtgccaatggaaatatctgccactgaaatctagacagaagcattctcagaaactacttcgtgatgtttgcattcaacacacagagttgaacataccccttcacagagcagttttgaaaacctctttctgtagaatctgcaagtggatattcggaccactttgaggccttcataagaaacagtaatatcttcacataaaaactagatagaagcattgtcagaaagttctttgtgatgtgtgaattcaactcacagaattgaaccttccttcaatagagcagttgtgaaacactctttttctagaatctgcaagtagatatttggagcgctttgaggccttcgttggaaaccggaatatcttcacaggaaaagtagatagaggcattctcagaaactttttcgtgttatgtggattcaactcacagcgttgaacatttcttttgatagagcagttttgtaaaactcttttatcgaatctgcaagtagacatttggagtgctttgagggctgtggtgcaaaaggaaatgtcttcccatagaaactagactgaagcattctcatcaacttctttgtgacgtttgcattcatctcacagtgttgaacattcctttccatagggtagttttgaagcactatttttgcagaatctgcaagtggatatttggactgctttgaggccttcatcggaaacgggaatatcttcacataaacactagacagaagcattctcagaaacttctttgtggtctgtccattcaactcacagagttgaaccttcctttttatggagcagttttgaaacactgttttcggaggatctgcaagtggatatttggagcgctttgaggcctattgtagaaaaagaaatatctgcctatgacaactagacagaagcattccgagaaacttctctgtgatgtttgcattcaactagcagagttgaaccttccttttgatagggcagtttggaaacactctttttgtagaatctgcatgtggatatctggagcggtttgaggcctacggtcaaaaaggaaatatcttcctgggaaaaatagacgaaagtattctcagaaactgctttgtgatatgtgcattcgactcaccgagttgaaactttttttggatagagcagttttgaaacactctgtagaatctgaaggtggatatttggagctctttgagggctatggcggaaaagaaaagatattcacattaaactagacagcagcattctcagaaacttctttaggatgtttgcggtaaactcacagagttgaacctacctttccatagagcagttttgaaacactctgtttgtgggatccgcaagtggatatttggaccgctttgaggcctttgctggaaatgggaatatcttcacatataaactagacagaagcattctcagtaacttcttcgtgatgtgtgcattctactcccgaatttgaatcttccttttcatgaagcagttttgaaacactctgtttgtgcaatccacaattggataattggaacgctttgatgcccatggtagaaaaggaaatatcctcatataaaaactagacacaaggattcacagaaaatgctttgtgatgtgtgcattcaaatcacggagttgaatctttcttttgtcagagcagttttgaaacactgtttctgtggaatctgccagcggacacttggagcgctttgagggttgtggtggagaaggaaatatcttcccataaaaactagaaagaagcattctcagaaccatttatgtgaagcgtgcattcaactcacagagttgaaccttccttttgatagaacagttttgaaacactcttttgaacaattgcaggtgaatatttggagggctttgaagcctttgttggaaacgggaatatcttcacacacaaactagccagaagcattctcagaaacttctttgtgatgtgtgcgttgaacccagagagatgaacctttcctttgatagagcagttttgaaacgtgtttttgtaagatctgcaagcggataattggcttcgctttgtgtcctttgttggaaacgggaatatcttctaataaaaactagacagaaatattctcagaatcttctttgtgatgtgggcattcaactaacagagttgaacatttcttgtgacagagcagttttgaaacactctttttgtagaatctgccagtggatatttggagcgctttgagggctttgtagaaatggaaaagtcttcacctaaaaactagacagaagcattctcagaaactgcttcgggatgtttgcattcaactcacagagttgaatatacctctgcatagagcagttttgaaaacctctttttgtagaatctgcaagtggatattcggaccactttgaggccttcatgggaaacagtaatatcttcacataaaaactagatagaagcatagtcagaaagttctttgtgatgtgtgaattcaaatcacagaattgaaacttcctttaatagagcagttttgaaacactctttttctagaatctggaagtagatatttggagcgctttgaggccttcgttggaaaccggaatatcttcacataaaaagcagatagaggcattctcagaaactttttcgtgatatgtggattcaactcacagcgttgaacctttcttttgatagagcagttttgtaaaactcttttatcgaatctgcaagtagacatttggagtgctttgagggctgtggtgcaaaaggaaatgtcttcccatagaaactagattgaagcattctcagcaacttcttggtgacgtttgcattcatctcacagtgttgaacatacctttccatagagtggttttgaaacactgtttctgtagaatctgcaagtggatatttggactgctttgaggccttcatcggaaacgggaatatcttcacataaacactagagagaagcattctcagaaacttctttgtggtctgtccattcaactcacagagttgaaccttcctttttatggagcagttttgaaacactgttttcggaggatctgcaagtggatatttggagcgctttgaggcctacggtagaaaaagaaatatctgcctatgacaactagacagaagcattctgagaaacttctttgtgatgtttgcattcaactagcagagttgaaccttccttttgatagggcagtttggaaacactctttttgtagaatctgcatgtggatatctggagcgatttgaggcctacggtcaaaaaggaaatatcttcctgggaaaaatagacgaaagcattctcacaaagtgctttgtgatatgtgcattcgactcaccgagttgaaacttttttttgatagagcagttttgaaacactctgtagaatctgaaagtggatatttggagctctttgagggctatggcggaaaagaaaatatattcatattaaactagacagcagcattctcagaaacctctttaggatgtttgcagtaaactcacagagttgaacatacctttccgtagagcagttttgaaacactctgtttgtgggatccgcaagtggatatttggaccgctttgagacctttgctggaaatgcgaatatctgcacatataaactagacagaagcattctcagaaacttcttcgtgatgtgtgcattctactcccaaatatgaatcttccttttcatgaagcagttttgaaacactctatttgtgcattctacaattggatgattggaacgctttgatgcccatggtagaaaaggaaatatcctcatataaaaactagacagaaggattcacagaaaatgctttgtgatgtgtgcattcaaatcacggagttgcatctttcttttgtgagagcagttttgaaacactgtttctgtggaatctgccagcggacacttggagcgctttgagggctatggtggagaaggaaatatcttcccataaaaactagaaagaagcattctcggaaacatttatgtgaagcgtgcattcaactcacagagttgaacctttcttttgagagaacagttttgaaacactcttttgaacaattgcaggtgaatctttggagcgctttgaagcctttgttggaaatgggaatatcttcacacacaaactagccagaagtattctcagaaacttctttgtgatgtgtgcgttgaacccagagagatgaacctttccttggatagagcagttttgaaacgtgtttttgtaagttctacaagcggataattggcttcgctttgtgtcctttggtggaaacgggaatatcttctaataaaaactagacagaaatattctcagaatctcctttgtgatgtgggcattcaactaacacagttgaacatttcttttcacagagcagttttgaaacactcttttggtagaatctgccagtggatatttggagcgcttggagggctattgtgccaatggtaatatctgcccctgaaaactagacagaagcattctcagtaaactgctttgtgatgtttgcattcaactcacagagttgaacataccttttcatagagcagttttgaaaacctctttttgtagaatctgcaagaggatattcggaccactttgaggccttcataggaaacagtaatatcttcgcataaaaactagatagaagcattgtcagaaagttctttgtgatgtgtgaattcaactcacagagttgaaccttcctttaatagagcagttttgaaacactccttttctagaatctgcaagtagatatttggagcgctttgaggccttcgttggaaaccggaatatcttcacaggaaaagtagatagaggcattctcagaaacttttttgtgataagtagattcaactcacagcgttgaacctttcttttgatagagcagttttgaaaaactcttttatcgaatctgcaagtagacatttggagtgctttgagggctgtggtgcaaaaggaaatgtcttcccatagaaactagactgaagcattctcagcaacttctttgtgacgtttgcattcatctcacagtgttgaacatacctttccatagagtagttttgaaacactatttttgtagaatctgcaagtggatatttggactgctttgaggtcttcatcggaaacgggaatatcttcacataaacactagacagaagcattctcagaaacttctttgtgatctgtccattcaactcacagagttgaaccttcctttttatggagcagttttgaaacactgtttttggagaatctgcaagtggatatttggagcgctttgaggcctatggtagaaaaagaaatatctgcctctaaaaactagacagaagcattctcagaaactgctttgtgatatgtgcattcgactcaccgagttgaaattttttttgatagagcagttttgaaacactctgtagaatctgaaagtggatatttggagctctttgagggctatggcggaaaagaaaatatattcacattaaagtagacagcagcattcccagaaacttccttaggatgtttgcagtaaactcacagagttgagcattcctttccgtagagcagttttgaaacactctgtttgtgggatccgcaagtggacatttggaccgctttgagacctttgctggaaatgggaatatcttcacatataaactggacagaagcattctcagaagcttcttcgtgatgtgtgcattctactcccaaatttgaatcttccttttcatgaagcagttttgaaacactctgtttgtgcaatccacaattggataattggaaagctttgatgcccatggtagaaaaggaaatatcctcatataaaaactagacagaaggattcacagaaaatgctttgtgatgtgtgcattcaaatcacggagttgaatctttcttttgttagagcagatttgaaagactgtttctgtggaatctgccagcggacacttggagcgctttgagggctacggtggagaaggaaatatcttcacataaaaactagaaagaagcattctcagaaccatttatgtgaagcgtcctttcaactcacagagttgaaccttccttttgatagaacagttttgaaacactcttttgaacaattgcaggtgaatatttggagggctttgaagcctttgttggaaatgggaatatcttcacacacaaactagccagaagctttctcagaaacttctttgtgatgtgtgcgttgaacccagagagatcaacctttcctttgatagagcagttttgaaacgtgtttttgtaagatctgcaagcggatagttggcttcgctttgtgtcctttggtggaaacgggaatatcttctaataaaaactagacagaaatattctcacaatctcctttgtgatgtgggcattcaactaacacagttgaacatttcttttcacagagcagttttgaaacactcttttggtagaatctgccagtggatatttggagcgctttgagggctgttgtgccaatggaaatatctgcccctaaaatctagacagaagcattctcagaaactacttcgtgatgtttgcattcaactcacagagttgaacataactcttcatagagcaattttgaaaacctctttttggagaatctgcaagtggatattcagaccactttgaggccttcataggaaacagtaatatcttcacataaaaactatatagaagcattgtcagaaagttctttgtgatgtgtgaattcaactcacagagttgaaccttccttcaattgagcagttgtgaaacactctttttctagaatctgcaagtagatatttggagcgctttgaggccttcgttggaaaccggaatatcttcacaggaaaagtagatagaggcattctcagaaactttttcgtgatatgtggattcaactcacagcgttgaacctttcttttgatagagcagttttgtaaaactcttttatcgaatctgcatgtagacatttggagtgctttgggggctgtggtgcaaaaggaaatgtcttcccatagaaactagactgaagcattctcagcaacttcttggtgacgtttgcattcatctcacagtgttgaacatacctttccatagagtagttttgaaacactgtttttgtagaatcggtaagtggatatttggactgctttgaggccttcatcggaaacgggaatatcttcacataaacactagagagaagcattctcagaaacttctttgtgatctgtccattcaactcagagagttgaaccttcctttttatggagcagttttgaaacactgtttgtggagaatctgcaagtggatatttggagcgccttgaggccaatggtagaaaaagaaatatctgcctctaaatactagactgaagcattctgagaaacttctttgtgatgtttgccttcaactaccagagttgaaccttccttttgatagggcagtttggaaacactctttttgtagaatctgcatgtggatatctggagcgatttgaggcctacggtccaaaaggaaatatcttcctgggaaaaatagacgaaagcattctcagaaactgctttgtgatatgtgcattcgactcacctagttgaaactttttttggatagagcagttttgaaacactctgtagaatctgaaagtggatatttggagctctttgagggctatggcggaaaagaaaatatattcacattaaactagacagcagcattctcagaaacttctttaggatgtttgcagtaaactcacagagttgaacatacctttcggtagagcagttttgaaacactgtttgtgggatccgcaagtggatatttggaccgctttgagacctttgctggaaatgggaatatcttcacatataaactagacggaagcattctcagaaacttcttcgtgatgtgtgcattctactcccagatttgaatcttccttctcatgaagcagttttgaaacactctatttgtgcaagctacaattggataattggaacgctttgatgcccatggtagagaaggaaatatcctcatataaaaactagacagaaggattcacagaaaatgctttgtgatgtgtgcattcaaatcacggagttgaatatttcttttgttagagcagttttgaaacactgtttctgtggaatctgccagcggacacttggagcgctttgagggctatggtggagaaggaaatatcttcacataaaaactagaaagaagcattctcagaaccatttatgtgaagcgtgcgttcaactcacagagttgaaccttccttttgatagaacagttttgaaacactcttttgaacaattgcaggtgaatatttggagggctttgaagcctttgttggaaatgggaatatcgtcacacacaaactagccagaagcattctcggaaacttctttgtgatgtgtgcgttgaacccagagagatgaacctttcctttgatagagcagttttgaaacgtgtttttgtaagatctgcaagcagataattggcttcgctttgtgtcctttggtggaaacgggaatatcttctaataaaaactagacagaaatattctcagaatcttctttgtgatgtgggcattcaactaacacagttgaacgtttcttttcacagagcagttttgaaacactcttttggtagaatctgccagtggatatttggagcgctttgagggctattgtgccaacgaaaatatctgcccctaaaaactagacagaagcattctcagaaactgctttgtgatgtttgcattcaactcacagagttgaacctaccttttcatagagcagttttgaaaacctctttttgtagaatctgcaagaggatattcggaccactttgaggccttcataggaaacagtaatatcttcacataaaaactagatagaagcattgtcagaaagttctttgtgatgtgtgaattcaactcacagagttgaaccttcctttaatagagcagttgtgaaacactctttttctagaatctgcaagtagatatttggagcgctttgaggccttcgttggaaaccggaatatcttcacaggaaaattagatagaggcattctcagaaactttttttgtgatatgtagattcaactcacagtgttgaacctttctttggatggagcagttttgaaaaactcttttatcgaatctgcaggtagacatttggggtgctttgagggctgtggtgcaaaaggaaatgtcttctcatagaaactagactgaagcattctcagcaacttctttgtgacgtttgcattcatctcacagtgttgaacataccttttcatagagtagttttgaaacactatttttgtagaatctgcaagtggatatttggactgctctgaggccttcatcggaaacgggaatatcttcacataaacactagacagaagcattctcagaaacttctttgtcatctgtccattcaactcacagagttgaaccttcctttttatggagcagttttgaaacactccttttggagaatctgcaaatggatatttggagcgctttgaggcctatggtagaaaaagaaatatctgcctctaaaaaccagacagaagcattctgagaaacttctttgtgatgtttgcattcaactaccagagttgaaccttccttttgatagggcagtttggaaacactctttttgtagaatctgcatgtggatatctggagcgatttgaggcctacggtcaaaaaggaaatatcttcctgggaaaaatagatgaaagcattctcagaaactgctttgtgatatgtgcattccactcaccgagttgaaacttttttttgatagagcagttttgaaacactctgtagaatctgaaagtggatatttggagctctttgagggctatggcggaaaagaaaatatattcacattaaagtagacagcagcgttctcagaaacttctttaagatgtttgcagtaaactcacagagttgaacatacctttccgtagagcagttttgaaacactctgtttgtgggatccgcaagtggatatttggaccgctttgagacctttgctggaaatgggaatatctgcacatttaaactagacagaagcattctcagaaacttcttcgtgatgtgtgcattctactcccgaatgtgaatcttccttttcatgaagcagttttgaaacactctgtttctgcaatccacaattggataattggaacgctttgatgcccatggtagaaaaggaaatatcttcatataaaaactagacagaaggattcacagaaaatgctttgtgatgtgtgcattcaaatcacggagttgaatctttcttttgtgagagcagttttgaaacactgtttctgtggaatctgccagcggacacttggagcgcttttagggctatggtggagaaggaaatatcttcccataaaaactagaaagaagcattctcagaaccatttatgtgaagcgtgcattcaactcacagagttgaaccttccttttgatagaacagttttgaaacactcttttgaacaattgcaggtgaatctttggagggctttgaagcctttgttggaaatgggaatatcttcacacacaaactagccagaagcattctcagaaacttctttgtgatgtgtgcgttgaacccagagagatgaaccattcctttgatagagcagttttgaaacgtgtttttgtaagatctgcaagcggatagttggcttcggctttgtgtcctttggtggaaacgggaatatcttctaataaaaactagacagaaaatattctcagaatctcctttgtgatgtgggcattcaacttacacagttgaacatttcttttcacagagcagttttgaaacactcttttggtagaatctgccagtggatatttggagcgcttggagggctattgtgccaatggaaatatctgcccctgaaaactagacagaagcattctcagaaactacttcgtgatgtttgcattcaacacacagagttgaacatacctcttcacagagcagttttgaaaacctctttctgtagaatctgcaagtggatattcagaccactttgaggccttcataggaaacagtaatatcttcacataaaaactagatagaagcattgtcagaaagttctttgtgatgtgtgaattcaactcacagagttgaaccttcctttaatagagcagttttgaaacactctttttctagaatctgcaagtagatatttggagcgcttggaggccttcgttggaaaccggaatatcttcacaggaaaagtagatagaggcattctcagaatctttttcgtgttatgtggattcaactcacagcgttgaacctttcttttgatagagcagttttgtaaaactcttttatcgaatctgcaagtagacatttggagtgctttcagggctgtggtgcaaaaggaaatgtcttcccatagaaactagactgaagcattctcagcaacttcttggtgacgtttgcattcatctcacagtgttgaacatacctttccatagagtggttttgaaacactgtttttgtagaatcggcaagtggatatttggactgctttgaggccttcatcggaaacgggaatatcttcacataaacatagagagaagcattctcaggaaacttctttgtgatctgtccattcaactcacagagttgaaccttcctttttatggagcagttttgaaacactgtttgtggagaatctgcaagtggatatttggagcgccttgaggccaatggtagaaaaagaaatatctgcctctaaatactagactgaagcattccgagaaacttctttgtgatgtttgcattcaactagcagagttgaaccttccttttgatagggcagtttgggaacactctttttgtaaaatctgcatgtggatatctggagcggtttgaggcctacggtcaaaaaggaaatatcttcctgagaaaaatagacgaaagcattctcagaaactgctttgtgatatgtgcattcgactcaccgagttgaaacttttttttgatagagcagttttgaaacactctgtagaatctgaaagtggatatttggagctcgttgagggctatggcggaaaagaaaagatattcacattaaactagacagcagcattctcagaaacttctttaggatgtttgcagtaaactcacagagttgaacatacctttccgtagagcagttttgaaacactctgtttgtgggatccgcaagtggatatttggaccgctttgagacctttgctgcaaatggggatatcttcacgtataaactagacagaagcattctcagaaacttcttcgtgatgtgtgcagtctactcccgaatttgaatcttccttttcatgaagcagttttgaaacactctgtttgtgcaatccacaattggataattggaacgctttgatgcccatggtagaaaaggaaatatcctcatataaaaactagacagaaggattcacagaaaatgctttgtgatgtgtgcattcaaatcacggagttgaatctttcttttgtcagaccagttttgaaacactgtttctgtggaatctgccagcggacacttggagcgctttgagggctatggtggagaaggaaatatcttcccctaaaaactagaaagaagcattctcggaaacatttatgtgaagcgtgcattcaactcacagagttgaaccttccttttgatagaacagttttgaaacactcttttgaacaattgcaggggaatctttggagcgctttgaagcctttgttggaaatgggaatatcttcacacacaaactagccagaagcattctcagaaacttctttgtgatgtgtgcgttgaacccagagagatgaacctttcctttgatagagcagttttgaaacgtgtttttgtaagatctgtaagcggatagttggcttcgctttgtgtcctttggtggaaacgggaatatcttctaataaaaactagacagaaatattctcacaatctcctttgtgatgtgggcattcaactaacacagttgaacatgtcttttcacagagcagttttgaaacactcttttggtagtatctgccagtggatatttggagcgctttgagggctgttgtgccaatggaaatatctgcccttaaaatctagacagaagcattctcagaaactacttcgtgatgtctgcattcaacacacagagttgaacatacctcttcacagagcagttttgaaaacctctttctgtagaatctgcaagtggatattcggaccactttgagcccttcataggaaacagtaatatcttcacataaaaactagatagaagcatagtcagaaagttctttgtgatgtgtgaattcaaatcacagagttgaaccttcctttaatagagcagttttgaaacactctttttctagaatctgcaagtagatatttggagcgctttgaggccttcgttggaaaccggaatatcttcacataaaaagcagatagtggcatgctcagaaacttttttgtcatatgtagattcaactcacaacgttgaacctttcttttgatagagcagttttgaaaaactcttttatcgaatctgcaagtagacatttggagtgctttgagggctgtggtgcaaaaggaaatgtcttcccatagaaactagactgaagcattctcagcaacttcttggtgacgtttgcatgcatctcacagtgttgaacatacctttgcatagagcggttttgaaacactatttttgtagaatctgcaagtggatatttggactgctttgaggccttcatcggaaacgggaatatcttcacataaacactagacagaagcattctcagaaacttctttgtggtctgtccattcatctcacagagttgaaccttcttttttatggagcagttttgaaacactgttttcggagaatctgcaagtggatatttggagcgctttgaggcctatggtagaaaaagaaatatctgcctatgacaactagacagaagcattccgagaaacttctttgtgatgtttgcattcaactagcagaggtgaaccttccttttgatagggcagtttggaaacactctttttgtagaatctgcatgtggatatctggagcggtttgaggcctacggtcaaaaaggaaatatcttcctgggaaaaatagacgaaagcattctcagaaactgctttgtgatatgtgcattccactcaccgagttgaaacttttttttgatagagcagttttgaaacactctgtagaatctgaaagtggatatttggagctctttgagggctatggcggaaaagaaaatatattcacattagactagagaggagcattctcagaaacttctttaggatgtttgcagtaaactcacagagttgaacataaatttccgtagagcagttttgaaacactctgtttgtgggatccgcaaggggatatttggaccgctttgagacctttgctggaaatgggaatatcttcacatataaactagacagaagcattctcagaaacttcttcgtgatgtgtgcattctactcccaaatttgaatcttccttttcatgaagcagttttgaaacactctatttgtagaatctacaattggatatttggaactctttgatgcccatggtagaaaaggaaatatcctcatataaaaactagacagaaggattcacagaaaatgctttgtgatgtgtgcattcatatcacggagttgaacctttctcttgctagagcagttttgaaacactgtctctgtggaatctgcctgcggacacttggagcgctttgagggctatggtagagaaggaaatatcttcagataaaaactagaaagaagaattctcagaaccatttatgtgaagcgtgcattcaactcacagagttgaaccttccttttgatagaacagttttgaaacactcttttgaacaattgcaggtgaatatttggagggctttgaagcctttgttggaaacgggaatatcttcacacacgaactagccagaagcattctcacaaacttctttgtgatgtgtgcgttgaacccagagagatgaacctttcctttgatagagcagttttgaaacgtgtttttgtaagatctgcaagcggataattggcttcgctttgtgtcctttggtggaaacgggaatatcttctaataaaaactagacagaaatattctcagaatctcctttgtgatgtgggcattcaactaacacagttgaacatttcttttcacagagcagttttgaaacactcttttggtagaatctgccagtggatatttggagcgcttggagggctattgtgccaatggaaatatctgcccctgaaatctggacagaagcattctcagaaactacgttgtgatgtttgcattcaactcacagtgttgaacatacctcttcatagagcagttttgaaaacctcttttggtagaatctgcaagtggatatttggaccactttgaggtcttcataggaaacagtaatatcttcacataaaaactagatggaagcattgtcagaaagttctttgtgatgtgtgaattcaactcacagagttgaaccttcctttaatagagcagttgtgaaacactctttttctagaatctgcaggtagatatgtggagcgctttgaggccttcgttggaaaccggaatatcttcacaggaaaagtagatagaggcattctcagaaacttttttgtgatatgtagattcaactcacagcgttgaacctttctttggatggagcagttttgaaaatcccttttatcgaatctgcaggtagacatttggggtgctttgagggctgtggtgcaaaaggaaatgtcttcccatagaaactagactgcagccttctcagcaacttctttgtgacgtttgcattcatctcacagtgttgaacatacctttccatagagtagttttgaagcactatttttgtagaatctgcaagtggatatttggactgctttgaggccttcatcggaaacgggaatatcttcacataaacactagacagaagcattctcagaaacttctttgtcatctgtccattcaactcacagagttgaaacttcctttttatggagcagttttgaaacactccttttggagaatctgcaggtggatatttggagcgctttgaggcctatggtagaaaaagaaatatctgcctctaaaaaccagacagaagcattccgagaaacttctttgtgatgtttgcattcaactagcagagttgaaccttccttttgatagggcagtttggatacactctttttgtagaatctgcatgtggatatctggagcggtttgaggcctacggtcaaaaaggaaatatcttcctgggaaaaatagacgaaaacattctcagaaagtgctttgtgatatgtgcattcgactcaccgagttgaaacttttttttgatagagcagttttgaaacactctgtagaatctgaaagtggatatttggagctctttgagggctatggcggaaaagaaaatatattcacattaaagtagacagcagcattctcagaaacttctttaggatgtttgcagtaaactcacagagttgaacttacctttccgtagagcagttttgaaacactctgtttgtgggatccgcaagtggatatttggaccgctttgagacctttgctggaaatgggaatatcttcacatataaactagacagaagcattctcagaaacttcttggtgatgtgtgcattgtactcccaaatttgaatcttccttctcatggagcagttttgaaacactctgtttgtgcaatctacaattggagaattggaacgcttggatgcccgtggtagaaaaagaaatatcctcatataaaaactagacagaaggattcacagaaaatcctttgtgatgtgtgcattcaaatcacggagttgaatctttcttttgtcagagcagttttgaaacactgtttctgtggaatctgccagcggacacttggagcgctttgagggctgtggtggagaaggaaatatcttcccataaaaactagaaagaagcattctcagagccatttatgtgaagcgtgcattcaactcacagagttgaaccttccttttgatagaacagtttttaaacactcttttgaacaattgcacgtgaatatttggagggctttgaagcctttgttggaaatgggaatatcttcacacacaaactagccagaagcattctcagaaacttctttgtgatgtgtgcgttgaacccagagagatgaacctttcctttgaaagagcagttttgaaacgtgtttttgtaagatctgcaagcggatagttggcttcgctttgtgtcctttggtggaaacgggaatatcttctaataaaatctagacagaaatattctcagaatcttctttgtgatgtgggcattcaactaacacagttgaacgtttctttgcacagagcagttttgaaacactcttttggtagaatctgccagtggatatttggagcgctttgagggctattgtgccaacggaaatatctgcccctaaaaactagacagaagcattctcagaaactgctttgtgatgtttgcattcaactcacagacttgaacatacctctgcatagagcacttttggaaacctctttttgtagaatctgcaagtggatattcggaacactctgaggccttcataggaaacagtaatatcttcacataaaaaatagataaaagcattgtcagaaagttctttgtgatgtgtgaattcaactcacagagttgaaccttcctttcatagagcagttttgaaacactctttttctagaatctgcaagtagatatttagagcgctttgaggccttcgttggaaaccggactatcttcacgtaaaaagtagatagaggcattctcagaaaacttttttgtgatatgtagattccactcacagcgttgaacctttcttttgatagagcagttttgaaaaattcttttatcgaatctgcaagtagacatttggggtgctttgagggctgtggtgcaaaaggaaatgtcttcccatggaaactagactgaagcattctcagcaacttcttcgtgaggtttgcactcatctcacagtgttgaacagacctttccatagagtagttttgaaacactatttttgtagaatctgcaactggatatttggactgctttgaggccttcatcggaaacgggaatatcttcacataaacactagagagaagcattctcagaaacttctttgtcatctgtccattcaactcacagagttgaacctacctttttatggagcagttttgaaacactccttttggagaatctgcaagtggatatttggagcgctttgaggcctatggtagaaaaagaaatatctgcctctaaaaaccagacagaagcattctgagaaaagttctttgtgatgtttgcattcaactaggcagagttgaaccttccttttgatagggcagtttggaaacactctttttgtagaatcttcatgtggatatctggagcggtttgaggcctacggtcaaaaaggaaatatcttcctgggaaaaatagacgaaagcattctcagaaagggctttgtgatatgcgcattcgactcaccgagttgaaacttttttttgatacagcagttttgtaacactctgtagaatctgaaagtggatatttggagctctttgagggctatggcggaaaagaaaatatattcacattaaagtagacagcagcattctcagaaacttctttatgatgtttgcatcaaactcacagagttgaacatacctttccatagagcagttttgaaacactctttttgtggaatccgcaagtggatatttggaccgctttgagaccttcgctggaaatgggaatatcttcacatataaactggactgaagcattctcagaaacttcttcgtgatgtgtgcattctactcccaaatatgaatcttccttttcatgaagcagttttgaaacactctatttgtgcattctacaattggatgattggaacgctttgatgtccatggtagaaaaggaaatatcctcatataaaaactagacagaaggattcacagaaaatgttttgtgatgtgggcattcaaatcacggagttgaatctttcttttgttagagcagttttgaaacactgtttctgtggaatctgccagcagacacttggagcgctttgagggctgtggtggagaaggaaatatcttcccataaaaactagaaagaagcattctcagaaacatttatgtgaagcgtgcattcaactcacagagttgaaccttccttttgatagaacagttttgaaacactcttttgaacaattgcaggtgaatctttggagcgctttgaagcctttgttggaaatgggaatatcttcacacacaaactagccagaagcattctcagaaacttctttgtgatgtgtgtgttgaacccagagagatgaacctttcctttgatagagcagttttgaaacgtgtttttgtaagatctgcaagcggataattggcttcgctttgtgtcctttggtggaaacgggaatatcttctaataaaaactagacagaaatattctcagaatcttctttgtgatgtgggcattcagctaacacagttgaacgtttcttttcacagagcagttttgaaacactcttttggtagaatctgccagtggatatttggagcgctttgagggctaatgtgccaatggaaatatctgcccctaaaaactagacagaagcattctcagaaactacattgtgatgtttgcattcgactcacagagttgaacatacctcttcatagagcagtttttaaaaccttttttgtagaacctgaaagttgatattcggaccactttgaagccttcataggaaacagtaatatcttcacataaaacctagatagaagcattgtcagaaagttctttgtgatgtgtgaattcaactcacagagttgaaccttcctttaatagagcagttttgaaacactctttttctagaatctgccagtagataattggagcgctttgaggccttcgttggaaaccggaatatcttcacataaaaagtagatagaggcattctcagaaactttttcgtgatatgtggattcaactcacagcgttgaaactttcttttgatagagcagttttgtaaaactcttttatcgaatctgcaagtagacatttggagtgctttgagggctgtggtgcaaaaggaaatgtcttcccatagaaactagactgaagcattctcagcaacttctttgtgacgtttgcattcaaatcacagtgttgaacatacctttgcatagagtagttttgaaacactatttttgtagaatctgcaagtggatatttggactgctttgaggccttcatcggaaacgggaatatcttcacataaacactggacagaagcattctcagaaacttctttgtggtctgtccattcaactcacagagttgaaccttcctttttatggagcagttttgaaacactgtttttggagaatctgcaagtggatatttggagcgctttgaggcctatggtagaaaaagaaatatctgcctatgacaactagacagaagcattccgagaaacttctttgtgatgtttgcattcaactagcagagttgaaccttccttttggtagggcagtttggaaacactctttttgtagaatctgcatgtggatatctggagcggtttgaggcctacggtcaaaaaggaaatatcttcctgggaaaaatagacgaaagcattctcagaaagtgctttgtgatatgtgcattcgactcaccgagttgaaacttttttttgatagagcagttttgaaacactctgtagaatctgaaagtggatatttggagctctttgagggctatggcggaaaagaaaatatattcacattaaaaaagtagacagcagcattctcagaaacttctttaggatgtttgcagtaaactcacagagttgaacatacctttccgtagagcagttttgaaacactctgtttgtgggatccgcaagtggatatttggacccctttgagacctttgctggaaacgggaatatcttcacatataaactagacagaagcattctcagaaacttcttcgtgatgtgtgcattgtactcccaaatttgaatcttccttctcatggagcagttttgaaacactctgtttgtgcaatctacaattggagaattggaaggcttggatgcccgtggtagaaaaggaaatatcctcatataaaaactagacagaaggattcacagaaaatgctttgtgatgtgtgcattcaaatcgcggagttgaatctttcttttgttagagcagttttgaaacactgtttctgtggaatctgccagcggacacttggagcgctttgagggctatggtggagaaggaaatatgttcacataaaaactagaaagaagcattctcagaaacatttatgtgaagcgtgcattcaactcacagagttgaaccttcctttcgatacaacagttttgaaacactcttttgaacaattgcaggtgaatctttggagcgctttgaagcctttgttggaaatgggaatatcttcacacacaaactagccagaagcattctcagaaacttctttgtgatgtgtgcgttgaacccagagagatgaacctttccttggatagagcagttttgaaacgtgtttttgtaagatctgcaagcggataattggcttcgctttgtgtcctttggtggaaacgggaatatcttctgataaaaactagacagaaatattctcagaatctccctttgtgatgtgggcattcaactaacacagttgaacatttcttttcacagagcagttttgaaacactcttttggtagaatctgccagtggatatttggagcgcttggagggctattgtgccaatggaaatatctgcccctgaaaactagacagaagcattctcagaaactgcttcgggatgtttgcattcaactcacagagttgaacatacctctgcatagagcagttttgaaaacctctttttgtagaatctgcaagtggatattcggaccactttgaggccttcataggaaacagtaatatcttcacataaaaactagatagaagcattgtcagaaagttctttgtgatgtgtgaattcaactcacagagttgaaccttcctttaatagagcagttttgaaacactctttttctagaatctgccagtagatatttggagcgctttgaggccttcgttggaaacaggaatatcttcacataaaaagtagatagaggcattctcagaaacttttttgtgatatgtagattcaactcacagcgttgaacctttctttggatggagcagttttgaaaaactcttttatcgaatctgcagttagacatttggggtgctttgagggctgtggtgcaaaaggaaatgtcttcccatagaaactagactgaagcattctcagcaacttcttggtgacgtttgcattcatctcacagtgttgaacatacctttccatagagtggttttgaatcactgtttttgtagaatcggcaagtggatatttggactgctttgaggccttcatcggaaacgggaatatcttcacataaacactagagagaagcattctcagaaacttctttgtcatctgtccattcaactcacagagttgaaccttcctttttctggagcagttttgaaacactctttttggagaatctgcaagtggatatttggagcgctttgaggcctatggtagaaaaagaaatatctgcccctaaacaccagacagaagcattccgagaaacttctctgtgatgtttgccttcaactagcagagttgaaccttccttttgatagggcagtttggaaacactctttttgtagaatctgcatgtggatatatggagcggtttgaggcctacggtcaaaaaggaaatatcttcctgggataaatagacgaaagcattctcagaaactgctttgtgatatgtgcattcgactcaccgagttgaaaattttttttgatagagcagttttgaaacactctgtagaatctgaaagtggatatttggagctctttgagggctacggcggcaaagaaactatattcacattaaagtagacagcagcattctcagaaacttctttaggatgtttgcagtaaactcacagagttgaacatacctttccgtagagcagttttgaaacactctgtttgtgggatccgcaagtggatatttggaccgctttgacacctttgctggaaatgggaatatcttcacatataaactagacagaagcattctcagaaacttcttcgtgatgtgtgcattctactcccaaatttgaatcttccttttcatgaagcagttttgaaacactctgtttgtgcattctacaattggatgattggaacgctttgatgtccatggtagaaaaggaaatatcctcatataaaaactagacagaaggattcacagaaaatgctttgtgatgtgtgcattcaaatcacggagttgaatctttcttttgtcagagcagttttgaaacactgtttctgtggaatctaccagcggacacttggagcgctttgagggctatggtggagaaggaaatatcttcacataaaaactagaaagaagcattctcggaaacatttatgtgaagcgtgccttcaactcacagagttgaaccttccttttgatagaacagttttgaaacactcttttgaacaattgcaggtgaatctttggagcgctttgaagcctttgttggaaatgggaatatcttcacacacaaactagccagaagaattctcagaaacttctttgtgatgtgtgcgttgaacccagagagatgaacctttcctttgatagagcagttttgaaacgtgtttttgtaagatcggcaagcggataattggcttcgctttgtgtcctttggtggaaacgggaatatcttctaataaaaactagacagaaatattctcagaatctcctttgtgatgtgggcattcaactaacacagttgaacatttcttttcacagagcagttttgaaacactcttttggtagaatctgcatgtggatatttggagcgcttggaggactattgtgccaatggaaatatctgcccctgaaaactagacagaagcattctcagaaactgcttcgtgatgtttgcattcaactcacagacttgaacatacctctgcatagagcagttttgaaaacctctttttgtagaatctgcaagtggatattcggaccactctgaggccttcataggaaacagtaatatcttcacataaaaactagatagaagcattgtcagaaagttctttgtgatgtgtgaattcaactcacagagttgaaccttcctttaatagagcagttttgaaacactctttttctagaatctgctagtagatatttggagtgcttggaggccttctttggaaaccggaatatcttcacaggaaatgtagatagaggcattctcagaaacttttttgtgatatgtagtttcaactcacagcgttgaacctttcttttgatagagcagttttgaaaaactcttttatcgaatctgccagtagacctttggagtgctttgagggctgtggtgcaaaaggaaatgtcttcccatagaaactagactgaagcattctcagcaacttcttggtgacgtttgcattcatctcacagtgttgaacatacctttccatagagtagttttgaaacactgtttttgtagaatcggtaagtgaatatttggactgctttgaggccttcatcggaaacgggaatatcttcacataaacactagagagaagcattgtcggaaacttctttgtgatctgtccgttcaactcacagagttgaaccttcctttttatggagcagttttgaaacactgtttgtggagaatctgcaagtggatatttggagcgccttgaggccaatggtagaaaaagaaatatctgcctctaaatactagactgaagcattctgagaaacttctttgtgatggttgcatgcaactacaagagttgaaccttccttttgatagggcagtttggaaacactctttttgtagaatctgcatgtggatatctggagcgatttgaggcctatggtcaaaaaggaaatattttcctgggaaaaatagacgaaagcattctcagaaagtgctttgtgatatgtgcattcgactcaccgagttgaaacttttttttgatagagaagttttgaaacactctgtagaatctgaaagtggatatttggagctctttgagggctatggcggaaaagaaaatatattcacattaaaaaagtagacagcagcattctcagaaacttctttaggatgtctgcagtaaactcacagagttgaacatacctttccgtagagcagttttgaaacactctgtttgtgggatccacaagtggatatttggacagctttgagatctttgctggaaatgggaatatcttcacatataaactagacagaaggattcacagaaaatgctttgtgatgtgtgcattcaaatcacggagttgaatctttcttttattagagcagttttgaaacactctatttgtgcaatctacaattggataattggaaccctttgatgcccatggtagaaaatgaaatatcctcatataaaaactagacggaaggattcacagaaaatgctttgtgatgtgtgcattcagatcacggagttgaatctttcttttgttagagctgttttgaaacactgtttctgtggaatctgccagcggacacttggagcgctttgagggctatggtggagaaggaaatatcttcacataaaaactagaaagaagcattctcagaaacatttatgtgaagcgtgcattcaactcacagagttgaaccttccttttgatacaacagttttgaaacactcttttgaacaattgcaggtgtatctttggagcgctttgaagcctttgttggaaatgggaatatcttcacacacaaactagccagaagcattctcagaaacttctttgtgatgtgtgcgttgaacccagagagatgaacctttcctttgatagagcagttttgaaacgtgtttttgtaagatcggcaagcggataattggcttcgctttgtgtcctttggtggaaactggcatgtcttctaataaaaactagacagaaatattctcagaatctcctttgtgatgtgggcattcaactaacacagttgaacattacttttcacagagcagttttgaaacactcttttggtagaatctgccagtggatatttggagcgcttggagggctattgtgccaatggaaatatctgcccctgaaaactagacagaagcattctcagaaactgcttcgtgatgtctgcattcaacacacagagttgaacatacctcttcacagagcagttttgaaaacctctttctgtagaatctgcaagtggatattcggaccactttgaggccttcataggaaacagtaatatcttcacataaaaactagatagaagcattgtcagaaagttctttgtgatgtgggaattcaacacacagagttgaaccttcctttaatagagcagtttgaaacactctttttctagaatctgccagtagatatttggagcgctttgaggccttcgttggaaaccggaatatcttcacataaaacgtagatagaggcattctcagaaacttttttgtgatatgtagattcaactcacagcgttgaacctttctttggatggagcagttttgaaaaacacttttatcgaatctgcaggtagacatttggggtgctttgagggctgtggtgcaaaaggaaatgtcttcccatagaaactagactgaagcattctcagcaacttctttgtgacgtttgcattcatctcacagtgttaaacatacctttccatagagtagttttgaagcactatttttgtagaatctgcaagtggatatttggaatgctttgaggccttcatcggaaacgggaatatcttcacataaacactagacagaagcattctcagaaacttctttgtgatctgtccattcaactcacagagttgaaccttcctttttatggagcagttttgaatcactgtttttgtagaatctgcaagtggatatttcgagcgctttgaggcctatggtagaaaaagaaatatctgcctctaaaaaccagacagaagcattctgagaaacttctttgtgatgtttgcattcaactaccagagttgaaccttccttttgatagggcagtttggaaacagtctttttgtagaatctgcatgtggatatctggagcgatttgaggcctacggtccaaaaggaaatatcttcctgggaaaaatagacgaaagcattctcagtaaactgctttgtgatatgtgcattcgactcaccgagttgaaacttttttttgatagagcagttttgaaacactctgtagaatctgaaagtggatatttggagctctttgagggctatggcggcaaagaaactatattcacattaaagtagacagcagcattctcagaaacttctttaggatgtttgcagtaatctcacagagttgaacctacctttccgtagagcagttttgaaacactctgtttgtgggatccgcaagtggatatttggaccgctatgagacctttgctggaaatgggaatatcttcacatataaactagacagaagcattctcagaaacttcttggtgatgtgtgcattgcactcccaattttgaatcttccttctcatggagcagttttgaaacactctgtttgtgcaatctacaattggataattggaacgcttggatgcccatggtagaaaaggaaatatcctcatataaaaactagacagaaggattcacagaaaatgctttgtgatgtgtgcattcaaatcacggagttgaatctttcttttgttagagcagttttgaaacactgtttctgtggaatctgccagcggacactaggagcgctttgagggctacggtggagaaggaaatatcttcacacaaaaactaaaaagaagcattctcagaaacatttatgtgaagcgtgcattcaactcacagagttgaaccttccttttgatacaacagttttgaaacactcttttgaacaattgcaggtgaatctttggagcgctttgaagcctttgttggaaatgggaatatcttcacacaaactagccagatgcattctcagaaacttctttgtgatgtgtgcgttgaacccagagagatgaacctttcctttgatagagcagttttgaaacgtgtttttgtaagatcggcaagcggataattggcttcgctttgtgtcctttggtggaaacgggaatatcttctaataaaatctagacagagatattctcagaaacttctttgtgatgtgggcattcaactgacacagttgaacatttcttttcacagagcagttttgaaacactcttttggtcgaatctgccagtggatatttggagcgctttgagggctattgtgccaatggaaatatctgcccctaaaaactagacagaagcattctcagaaactgctttgtgatgtttgcattcaactcacagaggtgaacatacctcttcatagagcagttttgaaaacctctttttgtagaatctataagtggatattcggaccactttgaggtcttcataggaaacagtaatatcttcacataaaaactagagagaagtattgtcagaaagttctttgtgatgtgtgaattcaactcacagagttgaaccttcctttaatagagcagttttgaaacactctttttctagaatctgcaagtagatatttggagcgctttgaggccttcgttggaaactggaatatcttcacataaaaagtagatagaggcattctcagaaacttttttgtgatatgtagattcaactcacagcattgaacctttctttggatggagcagttttgaaaaactcttttatcgaatctgcaggtagacatttggggtgctttgagggctgtggtgcaaaaggaaatgtcttcccatagaaactagactgaagcattctcagcaacttcttggtgacgtttgcattcatctcacagtgttgaacatacctttccatagagtggttttgaaacactgtttttgtagaatcgacaagtggatatttggactgctttgaggccttcatcggaaacgggaatatgttcacataaacactagagagaagcattctcagaaacttctttgtgatctgtccattcaactcacagagttgaaccttcctttttatggagcagttttgaaacactgtttgtgaagaatctgcaagtggatatttggagcgccttgaggccaatggtagaaaaagaaatatctgcctctaaatactagactgaagcattctgagaaacttctttgtgatgtttgcattcaactaccagagttgaaccttccttttgatagggcagtttggaaacactcattttgtagcatctgcatgtggatatctggagcgatttgaggcctacggtcaaaaaggaaatatcttcctgggaaaaatagacgaaagcattctcagaaactgctttgtgatatgtgcattcgaatcaccgagttcaaacttttttttcatagagcagttttgaaacactctgtagaatctgaaagtggctatttggaactctttgagggctatggcggaaaagaaaatatattcacattaaattagacagcagcattctcagaaacttctttaggatgtctgcagtaaactcacagagttgaacatacctttccgtagagcagttttgaaacactctgtgggatccacaagtggatatttggacagctttgagatctttgctggaaatgggaatatcttcacatataaactagacagaagcattctcagaaacttcttcgtgatgtgtgcattgtactcccaaatttgaatcttccttctcatggagcagttttgaaacactctgtttgtgcaatctacacttggataattggaacgcttggatgcccatggtagaaaaggaaatatcgtcatataaaaactagacagaaggattcacagaaaatgctttgtgatgtgtgcattcaaatcacggagttgaatctttcttttgtcagagcagttttgaaacactgtttctgtggaatctgccagcggacactttgagcgctttgagggctatggtagagaaggaaatatcttcccataaaaactagaaagaagcattctcagaaccatttatgtgaagcgtgcgttctactcacagagttgaaccttccttttgatagaacagttttgaaacactcttttgaacaattgcaggtgaatatttggagggctttgaagcctttgttggaaatgggaatatcttcacacacaaactagccagaagcattctcagaaaattctttgtgatgcgtgcgttgaacccagagagatgaacctttcctttgatagagcagttttgaaacgtgtttttgtaagatctgcaagcggataattggcttcgctttgtgtcctttggtgggaacgggaatatcttctaataaaaactagacagaaatattctcagaatctcctttgtgatgtgggcattcaactaacacagttgaacatttcttatcacagagcagttttgaaacactcttttggtagaatctgccagtggatatttggagcgcttggagggctattgtgccaatggaaatatctgcccctgaaaactagacagaagcattctcagaaactgcttcgggatgtttgcattcaactcacagagttgaacatacctctgcatagagcagttttgaaaacctctttttgtagaatctgcaagtggatattcggaccactttgaggccttcatgggaaacagtaatatcttcacataaaaactacatagaagcattgtccggaagttctttgtgatgtgtgaattcaactcacagagttgaaacttcctttaatagagcagtgttgaaacactctttttctagaatctgcaagtagatatttggagcgcttggaggccttcgttgtaaaccggaatatcttcacaggaaatgtagatagaggcatgctcagaaacttttatgtcatatgtagattcaactcacagcgttgaacctttcttttgatagagcagttttgaaaaactcttttatcgaatctgcaagtagacatttggagtgctttgagggctctggtgcaaaaggaaatgtcttcccatagaaactagactgaagcattctcagcaacttcttggtgacgtttgcattcacctcacagtgttgaacatacctttccatagagtggttttgaaacacagtttttgtagaatcggcaagtggatatttggactgctttgaggccttcatcggaaacgggaatatcttcacataaacactagagagaagcattctcagaaacttccttgtggtctgtccattcaactcacagagttgaaccttcctttttatggagcagttttgaaacactgttttcggaggatctgcaagtggatatttggagcgctttgaggcctatggtagtaaaagaaatatctgcctatgacaactagacagaagcattccgagaaacttctctgtgatgtttgcattcaactagcagagttgaaccttccttttgatagggcagtttggagacactctttttgtagaatctgcatgtggatatctggagcggtttgaggcctacggtcaaaaaggaaatatcttcctgggaaaaatagacgaaagcattctcagaaactgctttgtgatatgtgcattcgactcaccgagttgaaacttttttttgatagagcagttttgaaacactctgtagaatctgaaagtggatatttggagctctttgagggctatggcggcaaagaaactatattcacattaaagtagacagcagcattctcagaaacttctttaggatgtttgcagtaaactcacagagttgaacctacctttccgtagagcagttttgaaacactctgtttgtgggatccacaagtggatatttggaccgctttgagacctttgctggaaatgggaatatcttcacatataaactagacagaagcattctcagaaacttcttcgtgatgtgtgcattctactcccaaatttgaatcttccttttcatgaagcagttttgaaacactctatttgtgcaatctacaatgggataattggaacgctttgatgcccatggtagaaaaggaaatatcctcatataaaaactagacagaaggattcacagaaaatgctttgtgatgtgtgcattcaaatcacggagttgaatctttcttttgttagatcagttttgaaacactgtttctgtggaatctgccagcggacacttggagcgctttgagggctatggtggagaaggaaatatcttcacataaaaactagaaagaagcattctcagaaccgtttatgtgaagcgtgcattcaactcacagagttgaaccttccttttgatagaacagttttgaaacactcttttgaacaattgcaggtgaatatttggagggctttgaagcctttgttggaaatgggaatatcttcacacacaaactagccagaagcattctcagaaacttctttgtgatgtgtgcgttgaacccagagagatgaacctttcctttgatagagcagttttgaaacgtgtttttgtaagatctgcaagcggatagttggcttagctttgtgtcctttggtggaaacgggaatattttctaataaaaactagacagaaatattctcagaatcttctttgtgatgtgggcattcaactaacacagttgaacctttcttttcacagagcagttttgaaacactcttttgctagaatctgccagtggatatttagagcgctttgagggctattgtgccaacggaaatatctgcccctaaaaactagacagaagcattctcagaaactactttgtgatgtttgcattcaactcacagagttgaacatacctcttcatagagcagttttgaaaacctctttttgtagaatctgcaagtggatattcggaccactttgaggccttcataggaaacagtaataccttcacataaaaactagatagaagcattgtcagaaagttctttgtgatgtgtgaattcaactcacagagttgaaccttccattaatagagcagttttgaaacactctttttctagaatctgcaagtagatatttggagcgctttgaggccttcgttggaaaccggaatatcttcacataaaaagtagatagaggcattctcagtaaacttttttgtgatatgtagattcaactcacagcgttgaacctttctttggatggagcagttttgaaaaacccttttatcgaatctgcaggtagacatttggggtgctttgagggctgtggtgcaaaaggaaatgtcttcccatagaaactagactgaagcattctcagcaacttctttgtgacgtttgcattcatctcacagtgttgaacatacctttccatagagtagttttgaaacactgtttttgtagaatcggcaagtggatatttggactgctttgaggccttcatcggaaacgggaatatcttcacataaacactagagagaagcattctcagaaacttctttgtgatctgtccattcaactcacagagttgaaccttcctttttatggagcagctttgaaacactctttttggagaatctgcaagtggatattcggagcgctttgaggcctatggtagaaaaagaaacatctgcctctaaaaactagactgaagcattctgagaaacttctttgtgatgtttgctttcaactaccagagttgaaccttccttttgatagggcagtttggaaacactctttttgtagaatctgcatgtggatatctggagcgatttgaggcctacagtcaaaaaggaaatatcttcctgggaaaaatagacgaaagcattctcagaaactgctttgtgatatgtgcattcgactctccgagttgaaacttttttttgatagagcagttttgaaacactctgtagaatctgaaagtggatatttggagctcttcgagggctatggcggaaaagaaaatatattcacattaaactagacagcagcattctcagaaacttctttaggatgtttgcagtaaactcacagagttgaacctacctttccgtagagcagttttcaaacactctgtttgtgggatccgcaagtggatatttggaccgctttgagacctttgctggaaatgggaatatcttcacatataaactagacagaagcattctcagaatcttcttcgtgatgtgtgcattctactcccgaatttgaatcttccttttcatgaagcagttttgaaacactctgtttgtgcaatccacaattggataaatggaacgctttgatgcccatggtagaaaaggaaatatcctcatataaaaactagacagaagcattcacagaaaatgctttttgatgtgtgcattcaaatcacggagttgaatctttcttttgttagagcagttttgaaacactgtttctgtggaatctgccagcggacacttggagcgctttgagggctatggtggagaaggaaatatcttcacataaaaactagaaagatgcattctcagaaacatttatgtgaagcgtgcattcaactcacagagttgaaccttccttttgatagaacagttttgaaacactcttttgaacaattgcaggtcaatatttggagcgctttgaagcctttgctggaaatgggaatatcttcacgcacaaagtagccagaagcattctcagaaacttctttgtgatgtgtgcgttgaacccagagagatgaacctttcctttgatagagcagttttgaaacgtgtttttgtaagatcggcaagcggataattggcttcgctttgtgtcctttggtggaaacgggaatatcttctaacaaaaactagacagaaatattctcagaatcttctttgtgatgtgggcattcaactaacacagttgaacgtttcttttcacagagcagttttgaaacactcttttggtagaatctgccagtggatatttggagcgctatgagggctattgtgccaacggaaatatctgcccctaaaaactagacagaagcatcctcagaaactactttttgatgtttgcattcaactcacagagttgaacataccccttcatagagctgtttttaaaacctctttttgtagaatctgcaagtggatatttggaccactttgtgacctttcctggaaatggaaatatcttcacctaaaaactagacagaagcattgtcaggaagttctttgtgatgtgtgaattcaactcacagagttgaaccttcctttaatagagcagttttgaaacactctttttctagaatctgcaagtagatatttggagcgcttggaggccttctttggaaaccggaatatcttcacaggaaatgtagatagaggcattctcagaaactttttttgtgatatgtagattcaactcacagcgttgaacctttctttggatggagcagttttgaaaacctcttttatcgaatctgcaggtaaacatttggggtgctttgagggctgtggtgcaaaaggaaatgtcttcccatagaaactagactgaaacattctcagcaacttctttgtgacgtttgcattcatctcacagcattgaacatacctttccaaagagtagttttgaaacactatttttgtagaatctgcaagtggatatttggactgctttgaggccttcatcggaaacgggaatatcttcacataaacactagagagaagcattctcagaaacttctttgtgatctgtccattcaactcacagagttgaaccttccttttaatggagcagttttgaaacactgtttttggagaatcttcaagtagctatttggagcgctttgtggcctatggtagaaaaagaaatatctgcctataacaactagacagaagcattctgagaaacttctttgtgatgtttgcattcaactaccagaggtgaaccttccttttgatagggcagtttggaaacactctttttgtagaatctgcatgtggatatctggagcgatttgaggcctacggtccaaaaggaaatctcttcctgggaaaaatagacgaaagcattctcagaaactgctttgtgatatgtgcattcgactctccgagttgaaacttttttttgatagagcagttttgaaacactctgtagaatctgaaagtggatatttggagctctttgagggctatggcggaaaagaaaatatattcacattaaactagacagaagcattcccagaaacttctttaggatgtttgcagtaaactcacagagttgaacatacctttccgtagagcagttttgaaacactctgtttgtgggatccgcaagtggatatttggaccgctttgagacctttgctggaaacgggaatatcttcacatataaactggacagaagcattctcagaaacttcttcgtgatgtgtgcattctactcccaaatttgaatcttccttttcatgaagcagttttgaaacactctgtttgtgcaatccacaattggataattggaacgctttgatgcccatggtagaaaaggaaatatcttcatataaaaactagacacaaggattcacagaaaatgctttgtgatgtgtgcattcaaatcacggagttgaatctttcttttgtcagagcagttttgaaacactgtttctgtggaatctgccagcggacacttggagcgctttgagggctacggtggagaaggaaatatcttcccataaaaactagaaagaagcattctcagaaacatttatgtgaagcgtgcattccactcacagagttgaaccttccttttgatacaacagttttgaaacactcttttgaacaattgcaggtgaatctttggagcgctttgaagcctttgttggaaatgggaatatcttcacacacaaactagccagaagcattctcagaaacttctttgtgatgtgtgcgttgaacccagagagatgaacctttcctttgaaagagcagttttgaaacgtgtttttgtaagatctgcaagcggatagttggcttcgctttgtgtcctttgctggaaacgggaatatcttctaataaaaactagacagaaatattctcagaatcttctttgtgatgtgggcattcaactaacagagttgaacgtttcttttcacagagcagttttgaaacactcttttggtagaatctgtcagtggatatttggagcgctttgagggctattgtgccaacggaaatatctgcccctaaaaactagacagaagcattctcagaaactacttcgtgatgttcgcattcaactcacagagttgaacatacctcttcatagagcagatttgaaaacctctttctgtagaatctgcaagtggatattcggaccactttgaggccttcataggaaacagtaatatcttcacataaaaactagatagaagcattgtcagaaagttcttggtgatgtgtgaattcaactcacagagttgaaccttcctttaatagagcagttttgaaacactctttttctagaatctgcaagtagatatttggagcgctttgaggccttcgttggaaaccggaatatcttcacaggaaaagtagatagaggcattctcagaaacttttttgtgatatgtagattccactcacagcgttgaacctttctttggatggagcagttttgaaaaactcttttatcgaatctgcaggtagacatttggggtgctttgagggctgtggtgcaaaaggaaatgtcttcccatagaaactagactgaagcattctcagcaacttcttggtgacgtttgcattcatctcacagtgttgaacatacctttccatagagtggttttgaaacactgtttctgtagaatcggcaagtggatatttggactgctttgaggccttcatcggaaacgggaatatcttcacataaacactagagagaagcattctcagaaacttctttgtgatctgtccattcaactcacagagttgaaccttccttttcatggagcagttttgaaacactgtttgtggagaatctgcaagtggatatttggagcgccttgaggccaatggtagaaaaagaaatatctgcctctaaatactagactgaagcattccgagaaacttctctgtgatgtttgcattcaactagcagagttgaaccttccttttgatagggcagtttggaaacactctttttgtagaatctgcatgtggatatctggagcggtttgaggcctacggtcaaaaaggaaatatcttcctgggataaatagacgaaagcattctcagaaactgctttgtgatatgtgcattccactcaccgagttgaaactttttttgatagagcagttttgaaacactttgtagaatctcaaagtggatatttggagctctttgagggctatggcggaaaagaaaatatattcacattaaacttgacatcagcattctcagaaacttatttatgatgtttgcactaaactcacagagttgaacatacctttccgtagagcagttttgaaacactctgtttgtgggatccgcaagtggatatttggaccgctttgagacctttgctggaaatgggaatatcttcacatataaactagacagaagcattctcagaaacttcttcgtcacgtgtgcattctactcccagctttgaatcttccttctcatgaagcagttttgaaagactctatttgtgcaatctacaattggataattggaacgctttgatgcccatggtagagaaggaaatatcctcatataaaaactagacagaaggattcacagaaaatgctttgtgatgtgtgcattcaaatcacggagttgaatctttcttttgttagagcagttttgaaacactgtttctgtggaatctgccagcggacacttggagtgctttgagggctgtggtggagaaggaaatatcttcccataaaaactagaaagaggcattctcagaaacttttgtgtgatatgtagattcaactcacagcgttgaaccttccttttgatagaacagttttgaaacactcttttgaacaattgtaggtgaatatttcgagggctttgaagcctttgttggaaatgggaatatcttcacacacaaagtagccagaagcattctcagaaacttctttgtgaggtgtgcgttgaacccagagagaagaacctttcctttgatagagcagttttgaaacgtgtttttgtaagatcggcaagcggataattggcttcgctttgtgtcctttggtggaaacgggaatatcttctaataaaaactagacagaaatattctcagaatctcctttgtgatgtgggcattcaactaacacagttgaacatttcttttcacagagcagttttgaaacactcttttggtagaatctgccagtggatatttggagcgctttgagggctgttgtgccaatggaaatatctgcccctaaaatctagacagaagcattctcagaaactgcttcgtgatgtttgcattcaactcacagggttgaacatacctctgcatagagctgttttgaaaacctctttttgtagaatctgcaagtggatattcggaccactttgaggccttcataggaaacagtaatatcttcacataaaaactagatagaaatattctcagaatcttctttgtgatgtgggcattaaactcacagatttgaaccttcctttaatagagcagttttgaaacacactttttctagaatcggcaagtagatctttggagcgctttgaggccttcgttggaaaccggaatatcttcacaggaaaagtagatagaggcattctcagaaactttttcgtgatatgtggattcaactcacagcgttgaacctttcttttgatagagcagttttgtaaaactcttttatcgaatctgcaagtagacatttggagtgctttgagggctgtggtgcaaaaggaaatgtcttcccatagaaagtagactgaagcattctcagcaacttctttgtgacgtttgcattcatctcacagtgttgaacatacctttccatagagaagttttgaaacactaattttgtagaatctgcaagtggatatttggagtgctttgaggccttcatcggaaacgggaatatcttcacataaacactagacagaagcattctcagaaacttctttgtcatctgtccattcaactcacagagttgcaccttcctttttatggagcagttttgaaacactccttttggagaatctgcaagtggatatttggagcgctttgaggcctatggtagaaaaagaaatatctgcctctaaaaaccagacagaagcattccgagaaaagttctttgtgatgtttgcattcaactagcacagttgaaccttccttttgatagggcagtttggaaacactctttttgtagaatctgcatgtggatatctggagcggtttgaggcctacggtcaaaaaggaaatatcttcctgggaaaaatagacgaaagcattctcagaaactgctttgtgatatgtgcattcgactcaccgaattgcaactttttttggatagagcagttttgaaacactctgtagaatctgaaagtggatatttggagctctttgagggctatggcggaaaagaaaatatattcactttaaactagacagcagcattctcagaaacttctttaggatgtttgcagtaaactcacagagttgaacatacctttccgtagagcagttttgaaacactctgtttgtgggatccgcaagtggatatttggaccgctttgagacctttgctggaaatggcaatatcttcacgtataaactagacagaagcattctcagaaacttcttcgtgaagtgtgcagtctactccggaatttgaatcttccttttcatgaagcagttttgaaacactctgtttgtgcaatccacaattggataattggaacgctttgatgcccatggtagaaaaggaaatatactcatataaaaactagacagaaggattcacagaaaatgctttgtgatgtgtgcattcaaatcacagagttgaatctttcttttgttagagcagttttgaaacactgtttctgtggaatctgccagcggacacttggagcgctttgagggctacggtggagaaggaaatatcttcacataaaaactagaaagaagcattctcagaaacatttatgtgaagcgtgcattcaactcacagagttgaaccttccttttgatagaacagttttgaaacactcttttgaacaattgcaggtgaatctttggagcgctttgaagcctttgttggaaatgggaatatcttcacacacaaactagccagaagcattctcagaaacttctttgtgatgtgtgcgttgaacccagagagatgaacctttcctttgatagagcagttttgaaacgtgtttttgtaagatcggcaagcagataattggcttcgctttgtgtcctttggtggaaacgggaatatcttctaataaaaactagacagaaatattctcagaatctcctttgtgatgtgggcattcaactaacacagttgaacatttcttttcacagagcagttttgaaacactcttttggtagaatctgccagtggatatttggagcgcttggagggactactgtgccaatggaaatatctgcccctgaaaactagacagaagcattctcagaaactacttcgtgatgtttgcaatcaactcacagagttgaacatacctcttcacagagcagttttgaaaacctctttttgtagaatctgcaagtggatattcggagcactttgaggccttcataggaaacagtaatatcttcgcataaaaactagatagaagcattgtcaggaagttctttgtgatgtgtgaattcaactcacagagttgaaccttcctttaatagagcagttttgaaacactctttttctagaatctgcaagtagatatttggagcgcttggaggccttcgttggaaaccggaatatcttcacaggaaatgtagatagaggcattctcagaaactttttcgtgatatgtggattcacctcacagcgttgaacctttcttttgatagagcagttttggaaaactcttttatcgaatctgcaagtagacatttggagtgctttgagggctgtggtgcaaaaggaaatgtcttcccatagaaactagactgaagcattctcagcaacttcttggtgacgtttgcattcatctcacagttttgaacatacctttccatagagtggttttgaaacactgtttttgtataatcggcaagtggatatttggactgctttcaggccttcatcggaaacgggaatatcttcacataaacactagagagaagcattctcagaaacctctttgtggtctgtccattcaactcacagagttgaaccttcctttttatggagcagttttgaaaccctgtttttggagaatctgcaagtggatatttggagcgctttgaggcctatggtagaaaaagaaatatctgcctatgacaactagacagaagcattccgagaaaagttctttgtgatgtttgcattcaactaccagagttgaaccttccttttgatagggcagtttggaaacactctttttgtagaatctgcatgtggatatctggagcggtttgaggcctacggtcaaaaaggaaatatcttcctgggaaaaatagacaaaagcattctcagaaactgctttgtgatatgtgcattcgactcaccgagttgaaacttttttttgatagagcagatttgaaactctctgtagaatctgaaagtggatatttggagctctttgagggctatggcggaaaagaaaagatattcacattaaactagacagcagcattcccagaaacttctttaggatgtttgcagtaaactcacagagttgaacatacctttccgtagagcagctttgaaacactctctttgtgggatccgcaagtggatatttggactgctttgagacctttgctggaaacgggaatatcttcacatataaactggacagaagcattctcagaaacttcttcgtgatgtgtgcattctactcccgaatttgaatcttccttttcatgaagcagttttgaaacactctgtttgtgcaatccacaattggataattggaacgctttgatgcccatggtagaaaaggaaatatcctcatataaaaactagacacaaggattcacagaaaatcctttgtgatgtgtgcattcaaatcacggagttgaatctttcttttgtgagagcagttttgaaacactgtttctgtggaatctgccagcggactcttggagctctttgagggctatggtggagaaggaaatatcttcccataaaaactagaaagaagcattctcagaaacatttatgtgaagcgtgcattcaactcacagagttgaaccttcgttttgatacaacagttttgaaacactcttttgaacaattgcaggtgaatctttggagcgctttgaagcctttgttggaaatgggaatatcttcacacacaaactagccagaagcattctcagaaacttctttgtgatgtgtgcgttgaacccagagagatgaacctttccttggatagagcagttttgaaacgtgtttttgtaagatctgcaagcggataattggcttcgctttgtgtcctttggtggaaacgggaatatcttctaataaaaactagacggaaatattctcagaatctcctttgtgatgtgggcattcaactaacacagttgaacatttcttttcacagagcagttttgaaacactcttttgggagaatctgccagtggatatttggagcgcttggagggctattgtgccaatggaaatatctgcccctggaaactagacagaagcattctcagaaactacattgtgatgtttgcattcgaatcacagagttgaacatacctcttcatagagcagttttgaaaaccttttttgtagaatctgaaagtggatattcggaccactttgaggccttcataggaaacattaatatcttcacataaaaactagatagaagcattgtcagaaagttctttgggatgtgtgaattcaactcacagagttgaaccttcctttaatagagcagttttgaaacactctttttctagaatctgcaagtagatatttggagcgctttcaggccttctttggaaaccggaatatcttcacataaaaagtagatagaggcattctcagaaactttttcgtgatatgtggattcaactcacagcgttgaacctttcttttgatagagcagttttgtaaaactcttttatcgaatctgcaagtagacatttggactgctttgagggctgtggtgcaaaaggaaatgtcttcccatagaaactagactgaagcattctcagcaacttcttggtgacgtttgcattcatctcacagtgttgaacatacctttccatagagtagttttgaaacactgtttgtgtagaatcggtaagtggatatttggactgctttgaggccttcatcggaaacgggaatatcttcacataaacactagagagaagcattctcagaaacttctttgtgatctgtccattcaactcacagagttgaaccttcctttttatggagcagttttgaaacactgtttttggaggatctgcaagtggatatttggagcaatttgaggcctatggtagaaaaagaaatatctgcctctaaaaactagacagaagcattccgagaaactcctctgtgatgtttgcattgaactagcagagttgaaccttccttttgatagggcagtttggaaacactctttttgtagaatctgcatgtggatatctggagcggtttgaggcctacggtcaaaaaggaaatatcttcctgggaaaaatagacgaaagcattctcagaaactgctttgtgatatgtgcattcgactcaccgatttgaaacttttttttgatagagcagttttgaaacactctgtagaatctgaaagtggatatttggagctctttgagggctatggcggaaaagaaaatatattcacattaaactagacagcagcattctcagaaacttctttaggatgtttacagtaaactcacagagttgaacatacctttccgtagagcagttttgaaacactctgtttgtgggatccgcaagtggatatttggaccgctttgagacctttgctggaaatgggaatatcttcacatataaactagacagaagcattctcagaaacttcttcgtgatgtgtgcattctactcccgaatttgaatcttcctttttatgaagcagttttgaaacactctgtttgtgcaatccacaattggataattggaacgctttgatgcccatggtagaaaaggaaatatcctcatataaaaactagacagaaggattcacagaaaatgctttgtgatgtgtgcattcaaatcacggagttgaatctttcttttgttagagcagttttgaaacactgtttctgtggaatctgccagcggacacttggagcgctttgagggctacggtggagaaggaaatatcttcacataaaaaatagaaagaagcattctcagaaacatttatgtgaagcgtacattcaactcacagagttgaaccttccttgtgatacaacagttttgaaacactcttttgaacaattgcaggtgaatctttggagcgctttgaagcctttgttggaaatgggaatatcttcacacacaaactagccagaagcattctcagaaacttctttgtgatgtgtgcgttgaacccagagagatgaacctttccttggatagagcagttttaaaacgtgtttttgtaagatctgcaagcggataattggcttcgctttgtgtcctttggtgggaacgggaatatcttctaataaaaactagacagaaatattctcagaatctcctttgtgatgtgggcattcaactaacacagttgaacatttcttttcacagagcagttttgaaacactcttttggtcgaatctgccagtggatatttggagcgctttgagggctgttgtgccaatggaaatatctgcccctaaaatctagacagaagcattctcagaaactgcttcgtgatgtttgcattcaactcacagacttgaacatacctctgcatagagcagttttgaaaacctctttttgtagaatctgcaagtggatattcggaccactctgaggccttcatgggaaacagtaaaatcttcacataaaaactagatagaagcattgtcagaaagttctttgtgatgtgtgaattcaactcacagagttgaaccttcctttaatagagcagttttgaaacactctttttctagaatctgcaagtagatatttggagcgctttgaggccttcgttggaaaccggaatatcttcacataaaacgtagatagaggcattctcagaaacttttttgtgatatgtagattcaactcacagcattgaacctttctttggatggagcagttttgaaaaacccttttatcgaatctgcaggtagacattcggggtgctttgagggctgtggtgcaaaaggaaatgtcttcccatagaaactagactgaagcattctcagcaacttctttgtgacgtttgcattcatctcacagtgttgaacatacctttccatagagtagttttgaaacactatctttgtagaatctgcaagtggatatttggactgctttgaggccttcatcggaaacgggaatatcttcacataaacactagagagaagcattctcagaaacttctttgtcatctgtccattcaactcacagagttgaaccttcctttttatggagcagttttgaaacactccttttggagaatctgcaagtggatatttggagcgctttgaggcctattgtagagaaagaaatatctgcctctaaaaaccagacagaagcattccgagaaacttctttgtgatgtttgcattcaactagcagagttgaaccttccttttgatagggaagtttggaaacactctttttgtagaatctgcatgtggatatctggagcggtttgaggcctacggtcaaaaaggaaatatcttcctgggaaaaatagacgaaagcattctcagaaagtgctgtgtgatatgtgcattcgactcaccgagttgaaacttttttttgatagagcagttttgaaacactctgtagaatctgaaagtggatatttggagctctttgagggctatggcggaaaagaaaatatattcacattaaagtagacagcagcattctcagaaacttctttaggatgtttgcagtaaactcacagagttgaacatacctttccgtagagcagttttgaaacactctgtttgtgggttccgcacgtggatatttggaccgctttgagacctttgctggaaatgggaatatcttcacatataaactagacagaagcattctcagaaacttcttcgtgatgtgtgcattctcctcccgatttcgaatcttccttttcatgaagcagttttgaaacactctgtttgtgcaatccacaattggataattggaacgctttgatgcccatggtagaaaaggaaatatcctcatataaaaactagacagaaggattcacagaaaatgctttgtgatgtgtgcattcaaatcacagagttgaatctttcttttgtcagagcagttttgaaacactgtttctgtggaatctgccagcggacacttggagcgctttgagggctgtggtggagaaggaaatatcttcccataaaaactagaaagaagcattctcagaaacatttatgtgaagcgtgcattcaactcacagagttgaaccttccttttgatagaagagttttgaaacactcttttgaacaattgcaggtgaatctttggagcgctttgaagcctttgttggaaatgggaatatcttcacacacaaactagccagaagcattctcagaaacttctttgtgatgtgtgcgttgaacccagagagatgaacctttcctttgatagagcagttttgaaacgtgtttttgtaagatcggcaagcggataactggcttcgctttgtgtcctttggtggaaacgggaatatcttctaataaaaactagacagaaatattctcacaatcatctttgtaatgtgggcattcaactaacacagttgaacatttcttttcacagagcagttttgaaacactcttttgctagaatctgccagtggatacttggagcgctttgagggctattgtgccaatggagatatcttcccctaaaaactagacagaagcattctcagaaactgctttgggatgtttgcattcaactgacagagttgaacatacctcttcatagagcagttttgaaaacctctttttgtagaatctgcaagtggatattcggaccactttgaggccttcataggaaacagtaatatcatcacataaaaactagatagaaggattgtcagaaagttctttgtgatgtgtgaattcaactcacagagttgaaccttcctttaatagagcagttttgaaacagtctttttctagaatctgccagtagatatttggagcgctttgaggccttcgttggaaaccggaatatcttcacataaaaagtagatagaggcattctcagaaacttttttgtgatatgtagattcaactcacagcgttgaacctttctttggatggagcagttttgaaaaactcttttatcgaatctgcaggtagacattcggggtgctttgagggctgtggtgcaaaaggaaatgtcttcccatagaaactagactgaatcattctcagcaacttcttggtgacgtttgcattcatctcacagtgttgaacatacctttgcatagagtagtttcaaaacactatttttgtagaatctgcaagtggacatttggactgctttgaggccttcatcggaaacgggaatatcttcacataaacactagacagaagcattctcagaaacttctttgtgatctgcccattcaactcacagagttgaaccttcctttttatggagcagttttgaaacactgtttttggagaatctgcaagtggatatttggagcgctttgaggcctatggtaggaaaagaaatatctgcctctaaaaactagacagaagcattccgagaaacttctttgtgatgtttgcattcaactagcagagttgaaccttccttttgatagggcagtttggaaacactctttttgtagaatctccatgtggatatctggagcggtttgaggcctacggtcaaaaaggaaatatcttcctgggaaaaatagacgaaagcattctcagaaactgctttgtgatatgtgcattcgactcaccgatttgaaactttttttggatagagcagttttgaaacactctgtagaatctgaaagtggatatttggagctctttgagggctatggcggaaaagaaaatatattcacattaaactagacagcagcattctcagaaacttctttaggatgtttgcagtaaactcacagagttgaacatacctttccgtagagcagttttgaaaccctctgtttgtgggatccgcaaggggatatttggaccgctttgagacctttgctggaaatgggaatatcttcacatataaactagacagaagcattctcagaaacttcttcgtgatgtgtgcattctactcccgaatttgaatcttccttttcatgaagcagttttgaaacaatctgtttgtgcaatccacaattggataattggaacgctttgatgcccatggtagaaaaggaaatatcctcatataaaaactagacagaaggattcacagaaaatgctttgtgttgtgtgcattcaaatcacggagttgaatctttcttttgtcagagcagttttgaaacactgtttctgtggaatctgccagcggacacttggagcgctttgagggctgtggtggagaaggaaatatcttcccataaaaactagaaagaagcattctcagaaacatgtatgtgaagcgtgaattcaactcacagtgttgaaccttccttttgatagaacagttttgaaacactcttttgaacaattgcaggtgaatctttggagcgctttgaagcctttgttggaaatgggaatatcttcacacacaaactagccagaagcattctcagaaacttctttgtgatgcgtgcgttgaacccagagagatgaacctttcctttgatagagcagttttgaaacgtgtttttgtaaggtctgcaagcggataatcgacttcgctttgtgtcctttggtggaaacgggaatatcttctaataaaaactagacagaaatattctcagaatctcctttgtgatgtgggcattcaactaacacagttgaacatttcttttcacagagcagttttgaaacactcttttggtagaatctgccagtggatatttggagcacttggagggctattgtgccaatggaaatatctgcccctgaaaactagacagaagcattctcagaaactacttcatgatgtttgcattcaactcagagagttgaacatacctcttcacagagcagttttgaaaacctctttttgtagaatctgcaagtggatattcggagcactttgaggccttcataggaaacagtaatatcttcgcataaaaactagatagaagcattgtcagaaagttctttgtgatgtgtgaattcaactcacagagttgaaccttcctttaatagagcagtttcgaaacactctttttctagaatctgcaagtagatatttggagcgctttgaggccttcgatgaaaaccggaatatcttcacaggaaaagtagatagaggcattctcagaaactttttcgtgatatgtggattcaactcacagcgttgaacctttcttttgatagagcagtgttgtaaaactcttttatcgaatctgcaagtagacatttggagtgctttgggggctgtggtgcaaaaggaaatgtcttcccatagaaactagactgaagctttctcagcaacttcttggtgacgtttgcattcatctcacagtgttgaacatacctttccatagagtggttttgaaacactgtttttgtagaatcggcaagtggatatttggactgctttgaggccttcatcggaaacgggaatatcttcacataaacactagagagaagcattctcagaaacttctttgtgatctgtccattcaactcacagagttgaaccttcctttttatggagcagttttgaaacactgtttgtggagaatctgcaagtggatatttggagcgccttgaggccaatggtagaaaaagaaatatctgcctctaaatactagactgaagcattctgagaaacttctttgtgatgtttgcattcaactaccagagttgaaccttccttttgatagggcagtttggaaacactcatttgtagaatctgcatgtggatatctggagcgatttgaggcctacggtcaaaaaggaaatatcttcctgggaaaaatagacgaaagcattctcagaaactgctttgtgatatgtgcattccactctccgagttgaaacttttttttgatagagcagttttgaaacactctgtagaatctgaaagtggatatttggagctctttgagggctatggcggaaaagaaaatatattcacattaaagtagacagcagcattctcagagacttctttaggatgtttgcagtaaactcacagagttgaacatacctttccgtaaagcagttttgaaaccctctgtttgtgggatctgcaagtggatatttggaccgctctgagacctttgctggaaatgggaatatcttcacatataaactagacagaagcattctcagaaacttcttcgtgatgtgtgcattctactcccaaatttgaatcttccttctcatgaagcagttttgaaacactctatttgtgcaatctacaattggataattggaaccctttgatgcccatggtagaaaaggaaatatcctcatataaaaactagacagaaggattcacagaaaatgctttgtgatgtgtgcattcaaatcacggagttgaatctttcttttgttagagcagttttgaaacactgtttctgtggaatctgccagcggacacttggagcgctttgagggctacggtggagaaggaaatatcttcacataaaaactagaaagaagcattctcagaaccatttatgtgaagcgtgcattcaactcacagagttgaaccttccttttgatagaacagttttgaaacactcttttgaacaattgcaggtgaatatttggagggctttgaagcctttgttggaaacgggaatatcttcacacaccaactagccagaagcattctcagaaacttgtttgtgatgtgtgcgttgaacccagagagatgaacctttccttcgatagagcagttttgaaacgtgtttttgtaagatcggcaagcggataattggcttcgctttgtgtcctttggtggaaacgggaatatcttataataaaaactagacagaaatattctcagaatcttctttgtgatgtgggcattcaactaacacagttgaacgtttcttttcacagagcagttttgaaacactcttttggtagaatctgtcagtggatatttggagcgctttgagggctattgtgccaacggaaatatctgcccctaaaaactagacagaagcattctcagaaactgcttcgtgatgtttgcattcaactcacagacttgaacatacctctgcatagagcagttttgaaaacctctttttgtagaatctgcaagtggatattcggaccacattgaggccttcataggaaacagtaatatcttcacataaaaactagatagaagcattgtcagaaagttctttgtgatgtgtgaattcaactcacagagttgaaccttcctttaatagagcagttttgaaacactctttttctagaatctgcaagtagatatttggagcgctttgaggccttcgttggaaaccggaatatcttcacataaaaagtaggtagaggcattctcagaaacttttttgtgacatgtagattcaactcacagcgttgaacctttcttttgatagagcagttttgaaaaactcttttatcgaatctgcaagtagacatttggagtgctttgagggctgtggtgcaaaaggaaatgtcttcccatagaaactagactgaagcattctcagcaacttctttgtgacgtttgcattcatctcacagtgttgaacatacctttccatagagtagttttgaagcactatttttgtagaatctgcaagtggatatttggactgctttgaggccttcatcggaaacgggaataccttcacataaacactagacagaagcattctcagaaacttctttgtggtctgtccattcaactcacagagttgaaccttcctttttatggagcagttttgaaacactgtttttggaggatctgcaagtggatatttggagcgctttgaggcccatggtagaaaaagaaatatctgcctatgacaactagacagaagcattccgagaaacttccttgcgatgtttgcattcaactagcagagtagaaccttccttttgatagggcagtttggaaacactctttttgtagaatctgcatgtggatatctggagcggtttgaggcctacggtcaaaaaggaaatatcttcctgggaaaaatagacgaaagcattctcagaaactgctttgtgatatgcgcattcgactcacctagttgaaacttttttttgatagagcagttttgaaacactctgtagaatctgaaagtggatatttggagctctttgagggctatggcggaaaagaaaatatattcacattaaagtagacagcagcattcccagaaacttctttaggatgcttgcagtaaactcacagagttgaacatacctttccgtagagcagttttgaaacactctgtttgtgggatccgcaagtggatatttggaccgctttgagacctttgctggaaacgggaatatcttcacatataaactagacagaagcattctcagaaacttcttcgtgatgtgtgcattctactcccaaatttgaatcttccttttcatgaagcagttttgaaacactctatttatgcaatctacaattggataattggaacgctttgatgcccgtggtagaaaaggaaatatcctcatataaaaactagacagaaggattcacagaaaatgctttgtgatgtgtgcattcaaatcacggagttgaatctttcttttcttagagcagttttgaaacactgtttctgtggaatctgccagcggacacttggagcccttggaacgctatggtggagaaggaaatatcttcacataaaaactagaaagaagcattctcagaaacatttatgtgaagcgtgcattcaactcacagagttgaacatttcgtttgatagaacagttttgaaacactcttttgaacaattgcaggtgaatctttggagcgctttgaagcctttgttggaaataggaatatattcacacacaaactagccagaaacattctcagaaacttctttgtaatgtgtgcgttgaacccagagagatgaacctttcctttgatagagctgttttgaaacgtgtttttctaacatctgcaagcggataattggcttcgcgttgcgtcctttggtggaaacgggaatatcttctaataaaaactagacagaaatattctcagaatcttctttgtgatgtgggcattcaactaacacagttgaacatttcttttcacagagcagttttgaaagactcttttggtagaatctgccagtggatatttggagcgctttgagggctattgtgccaatggaaatatcttcccctaaaaactagacagaagcattctcagaaactgcttcgtgatgtttgcattcaactcacagggttgaacatacctctgcatagagcagttttgaaaacctctttttgaagaatctgcaagtggatattcggaccactttgaggccttcataggaaacagtaatatcttcacataaaaactagatagagtaagcattgtcagaaagttctttgtgatgtgtgaattcaactcacagagttgaaccttcctttaatagagcagttttgaaacactcttcttctagaatctgcaagtagatatttggagcgctttgaggccttcgttggaaaccggaatatcttcacagaaaaagtagatagaggcattctcagaaactttttttgtgatatgtagattcaactcacagcgttgaacctttctttggatggagcagttttgaaaacctcttttatcgaatctgcaggtagacattcggggtgctttgagggctgtggtgcaaaaggaaatgtcttcccatagaaactagactgaagcattctcagcaacttcttggtgacgtttgcattcacctcacagtgttgaacatacctttccatagagtggttttgaaacactgtttttgtagaatcggcaagtggatatttggactgctttgaggccttcatcggaaacgggaatatcttcacataaacactagagagaagcattctaagaaacttctttgtgatctgtccattcaactcacagagttgaaccttcctttttatggagcagttttgaatcactgtttttggagaatctgcaagtggatatttggagcgatttgaggcctatggtagaaaaagaaatatctgcctctaaaatccagacagaagcattctgagaaacttctctgtgatgtttgcattcaactaccagaggtgaaccttccctttgatagggcagtttggaaacactcatttggagaatctgcatgtggatatctggagcgatttgaggcctacggtccaaaaggaaatatcttcctgggaaaaatagacgaaagcattctcaggaactgctttgtgatatgtgcattcgactctccgagttgaaactttttttggatagagcagctttgaaacactctgtagaatctgaaagtggatatttggagctctttgagggctatggcagaaaagaaaagatattcacattaaactagacagcagcattcccagaaacttctttaggatgtttgcagtaaactcacagagttgaacatacctttccgtagagcagctttgaaacactctgtgtgtgggatccgcaagtggatatttggaccgctttgagacctttgctggaaacgggaatatcttcacagataaactggacagaagcattctcagaaacttcttcgtgatgtgtgcattctactcccaaatttgaatcttccttttcatgaagcagttttgaaacactccgtttgtgtaatctacaattggataactggaacgctttgatgcccattgtagaaaaggaaataacctcatataaaaactagacagaaggattcacagaaaatgctttgtgatttgtgcattcaaatcacggagttgaatctttcttttgttagagcagttttgaaacactgtttctgtggaatctgccagcggacacttggagcgctttgagggctatggtggagaaggaaatatcttcacataaaaactagaaagaggcattctcagaaacttttgtgtgatatgtagattcaactcacagcgttgaaccttccttttgatagaacagttttgaaacactcttttgaacaattgcaggtgaatatttggagcgctttgaagcctttgttggaaatgggaatatcttcacacacaaagtagccagaagcattctcagaaacttctttgtgatgtgtgcgttgaacccagagagatgaacctttcctttgatagagcagttttgaaacgtgtttttgtaagatcggcaagcggataattggcttcgctttgtgtcctttcgtggaaacgggaatatcttctaataaaaactagacagaaatattctcagaatctcctttgtgatgtgggcattcaactaacacagttgaacatttcttttcacagagcagttttgaaacactcttttggtagaatctgccagtggatatttggagcgcttggagggctgttgtgccaatggaaatatctgcccctgaaaactagacagaagcattctcagaaactgctttgtgatgtttgcattcaactcacagagttgaacataccttttcatagagcagttttgaaaacctctttttgtagaatctgcaagaggatattcggaccactttgaggccttcataggaaacagtaatatcttcacataaaaactagatggaagcattgtcaggaagttctttgtgatgtgtgaattcaactcacagagttgaactttcctttaatagagcagtgttgaaacactctttttctagaatctgcaagtagatatttggagcgcttggaggccttcgttgtaaaccggaatatcttcagaggaaatgtagatagaggcattctcagaaactttttcgtgatatgtggattcaactcacagcgttgaacctttcttttgatagagcagttttgtaaaactcttttatcgaatctgcaagtagacatttggagtgctttggaggctgtggtgcaaaaggaaatgtcttcccatagaaactagactgaagcattctcagcaacttccttgtgacgtttgcattcatctcacagtgttgaacatacctttccatagagcagttttgaaacactatttttgtagaatctgcaagtggatatttggactgctttgaggccttcatcggaaacgggaatatcttcacataaacactagacagaagcattctcagaaacttctttgtggtctgtccattcaactcacagagttgaaccttcctttttatggagcagttttgaaacactgtttttggaggatctgcaagtggatatttggagcgctttgaggcctatggtagaaaaagaaatatcggcctatgacaactagacagaagcattctgagaaacttctttgtgatgtttgcattcaactaccagagttgaaccttccttttaatagggcagtttggaaacactctttttgtagaatctgcatgtggatatctggagcgatttgaggcctacggtccaaaaggaaatatcttcctgggaaaaatagacgaaagcattctcagaaactgctttgtgatatgtgcattcgactgaccgagttgaaacttttttttgatagagcagttttgaaacactctgtagaatctgaaagtggatatttggagctctttgagggctatggcggcaaagaaactatattcacattaaagtagacagcagcattctcagaaacttctttaggatgtctgcagtaaactcacagagttgaacatacctttccgtagagcagttttgaaacactctgtttgtggggtccgcaagtggatatttggacagctttgagatctttgctggaaatgggaatatcttcacatataaactagacagaagcattctcagaaacttcttcgtgatgtgtgcattctactcccgaatttgaatcttccttttcatgaagcagttttgaaacactctgtttgtgcaatccacaattggataattggaacactttgatgccaatggtagaaaaggaaatagcctcatataaaaactagacagaaggattcacagaaaatgctttgtgatgtgtgcattcaaatcacggagttgaatctttcttttgtcagagtagttttgaaacactgtttctgtgggatctgccagcggacacttggagcgctttgagggctgtggtggagaaggaaatatcttcccataaaaactagaaagaagcattctgagaaccatttatgtgaagcgtgcgttcaactcacagagttgaaccttccttttgatagaacagttttgaaacactcttttgaacaattgcaggtgaatatttggagggctttgaagcctttgttggaaatgggaatatcttcacacacaaactagccagaagcattctcagaaacttctttgtgatgtgtgcgttgaacccagagagatgaacctttcctttgatagagcagttttgaaacgtgtttttgtaagatctgcaagcggataattggcttcgctttgtgtcgcttggtggaaacgggaatatcttctaataaaaactagacagaaatattctcagaatcttctttgtgatgtgggcattcaactaacacagttgaaactttctcttcacagagcagttttgatacactcttttggtagaatctgccagtggatatttggagcgctttgaggactattgtgccaacggaaatatctgcccctaaaaactagacagaagcattctcagaaattactttgtgatgtttgcattcaactcacagatttgaaaatacctcctcatagagcagttttgaaaacatctttttgtagaatctgcaagtggatattcggaccactttgaggccttcataggaaacagtaatatcttcacagaaaaactagatagaagcattgtcagaaagttctttgtaatgtgtgaattcaactcacagagatgaaccttcctttaatagagcaattttgaaacactctttttccagagtctgcaagtagatatttggagcgctttgaggccttcgttggaaaccggaataccttcacataaaaagtagatagaggcattctcagaaacttttttgtgatatgtagattcatctgacagcgttgaacctttcttttgatagagcagttttgaaaaactcttttgtcgaatctgcaagtagacatttggagtgctttgagggctgtggtgccaaaggaaatgtcttcccatggaaactagactgaagcattctcagcaacttctttgtgacgtttgcattcatctcacagtgttgaacatatctttccatagagtagttttgaaacactgtttttgtagaatcggcaagtggatatttggactgctttgaggccttcatcggaaacgggaatatcttcacataaacactagagagaagcattctcagaaacttctttgtcatctgtccattcaactcacagagttgaaacttcctttttatggagcagttttgaaacactccttttggagaatctgcaagtggatatttggagcgctttgaggcctacggtagaaaaagaaatatctgcctctaaaaaccagacagaagcattccgagaaacttctttgtgatgtttgcattcaactagcagagttgaatccttccttttgcatagggcagtttggaaactctctttttgtagaatctgcatgtggatatctggagcggtttgaggcctacggtcaaaaaggaaatatcttcctgggaaaaatagacgaaagcattctcagaaactgctttgtgatatgtgcattcgactcaccgagttgaaacttttttttgatagagcagttttgaaacactctgtagaatctgaaagtggatatttggagctctttgagggctatggcggaaaagaaactatattcacattaaagtagacagcagcattcccagaaacttctttaggatgtttgcagtaaactcacagacttgaacatacctttccgtagagcagttttgaaacactctgtttgtgggatccgcaagtggatatttggacccctttgagacctttgctggaaacgggaatatcttcacatataaactagacagaagcattctcagaaatttcttggtgatgtgtgcattgtactcccaaatttgaatcttccttctcatggagcagttttcaaacactctgtttgtgcaatctacaattggagaattggaacgctcggaggcccgtggtagaaaaggaaatatcctcatataaaaactagacagaaggattcacagaaaatgctttgtgatgtgtgcattcaaatcacggggttgaatctttcttttgttagagcagttttgaaacactgtttctgtggaatctgccagcggacacttggagcgctttgagggccatggtggagaaggaaatatctttccataaaaactagaaagaagcattctcggaaacatttatgtgaagcatgcattcaactcacagagttgaaccttccttttgatagaacagttttgaaacactctttttaacaattgcaggtgaatctttggagcgctttgaaggctttgttggaaatgggaatatcttcacacacaaactagccagaagcattctcagaaacttctttgtgatgtgtgcgttgaacccagagagatgaacctttcctttgatagagcagtttggaaacgtgtttttgtaagatctgcaagctgataattggcttcgctttgtgtcctttggtggaaacgggaatatcttctaataaaaactagacagaaatattctcagaatcttctttgtgatgtgggcattcaactaacacagttgaacctttcttttcacagagcagtttggaaacacccttttggtagaatctgccagtggatatttggagcgctttcagggctattgtgccaacggaaatatctgcccctaaaaactagacagaagcattctcagaaactgcttcgtgatgtttgcattcaactcacagggttgaacatacctctgcatagagcagttttgaaaacctctttttgtagaatctgcaagtggatattcggaccactttgaggccttcataggaaacagtaatatcttcacataaaaactagatagaagcattgtcagaaagttctttgtgatgtgtgaattcaactcacagcgttgaaccttcctttattagagcagttttgaaacactctttttctagaatctgccagtagatatttggagcgctttgaggccttcgttggaaaccggaatatcttcacataaaacgtagatagaggcattctcagaatctctttgtgatatgtagattcaactcacagcgttgaacctttctttcgatggagcagttttgaaaaactcttttatcgaatctgcaggtagacatttggggtgctttgagggctgtggtgcaaaaggaaatgtcttcccatagaaactagactgaaagcattctcagcaacttctttgtgacgtttgcattcatctcacagtgttgaacatacctttccatagagtagttttgaaacactgtttttgtagaatcggccagtggatatttggactgctttgaggccttcatcggaaacgggaatatcttcacataaacactagagagaagcattctcagaaacttctttgtgatctgtccattcaactcacagagttgaaccttcctttttatggagcagttttgaaacactcctttgggagaatctgcaggtggatatttggagcgctttgaggcctatggtagaaaaagaaatatctgcctctaaaaaccagacagaagcattccgagaaacttctttgcgatgtttgcattcaactagcagagttgaactttccatttgatagggcagtttggaaacactctttttgtagaatctgcatgtggatatctggagcggtttgaggcctatggtcaaaaaggaaatatcttcctgggaaaaatagacgaaagcattctcagaaactgctttgtgatatgcgcattcaactcaccgagttgaaacttttttttgatagagcagttttgaaacactctgtagaatctgaaagtggatatttggagctctttgagggctatggcggaaaagaaaatatattcacattaaagtagacagcagcattctcagaaacttctttaggatgtttgcagtaaactcacagagttgaacctacctttccgtagagcagttttgaaacactctgtttgtgggatccgcaagtggatatttggaccgctttgagacctttgctggaaatgggaatatcttcacatataaactagacagaagcattctcagaaacttctttgtgatgtgtgcattgtactcccaaatttgaatcttccttctcatggagcagttttgaaacactctgtttgtgcaatctacaattggataattggaacgctttgatgcccatggtagaaaaggaaatatcctcatataaaaactagacagaaggattcacagaaaatgctttgtgatgtgtgcattcaaatcacggagttgaatctttcttttgtcagagcagttttgaaacactgtttctgtggaatctgccagcgaacacttggagcgctttgagggctatggtggagaaggaaatatcttcccataaaaactagaaagaagcattctcagaaccatttatgtgaagcgtgcgttcaactcacagagttgaaccttccttttgatagaacagttttgaaacactcttttgaacaattgcaggtgaatatttggggggctttgaagcctttgttggaaatgggaatatcttcacacacaaactagccagaagcattctcagaaacttctttgtgatgtgcgcgttgaacccagagagatgaacctttcctttgatagagcagttttgaaacgtgtttttgtaagatcggcaagcggataattggcttcgctttgtgtcctttggtggaaacgggaatatcttctaataaaaactagacagaaatattctcacaatcatctttgtgatgtgggcattcaactaacacagttgaacatttcttttcacagagcagtttggaaacactcttttgctagaatctgccagtggatacttggagcgctttgagggtattgtgccaatggaaatatcttcccctaaaaactagacagaagcattctcagaaactactttgtgatgtttgcattcaactcacagagttgaacatacctcttcatagagcagttttgaaaacctctttttgtagaatctgcaagtggatattcggaccactttgaggccttcataggaaacagtaatatcttcacataaaaactagatagaaatattctcagaatcttctttgtgatgtgggcattaaactcacagatttgaaccttcctttaatagagcagttttgaaacacactttttctagaatctgcaagtagatatttggagcgctttgaggccttcgttggaaaccggaatatcttcacaggaaaagtagatagaggcattctcagaaacttttttgtgatatgtagattcaactcacagcgttgaacctttctttggatggagcagttttgaaaaactcttttatcgaatctgcaggtagacatttggggtgctttgagggctctggtgcaaaaggaaaagtcttcccatagaaactagactgaagcattctcagcaacttcttgttgacgtttgcattcatctcacagtgttgaacatacctttccatagagtggttttgaaacactgtttttgtagaatcggcaagtggatatttggactgctttgaggccttcatcggaaacgggaatatcttccataaacactagagagaagcattctcagaaacttctttgtggtctgtccattcaactcacagagttgaaccttcctttttatggagcagttttgcaacactgttttcggagaatctgcaagtggatatttggagcgctttgaggcctatggtagaaaaagaaatatctgcctatgacaactagacagaagcattctgagaaacttctttgtgatgtttgcattcaactaccagaggtgaaccttccttttgatagggcagtttggaaacactctttttgtagaatctgcatgtggatatctggagcgatttgaggcctacggtccaaaaggaaatatcttcctgggaaaaatagacgaaagcattctcagaaactgctttgtgatatgtgcattcgactctccgagttgaaactttttttggatagagcagttttgaaacactctgtagaatctgaaagtggatatttagagctctttgagggctatggcggaaaagaaaagatattcacattaaactagacagcagcattctcagaaacttctttaggatgtttgcagtaaactcacagagttgaacatacctttccgtagagcagttttgaaacactctgtttgtgggatctgcaagtggatatttggaccgctttgagacctttgctggaaatgggaatatcttcacgtataaactagacagaagcattctcagaaacttcttcgtgatgtgtgcattgttctcccaaatttgaatcttccttctcatggagcagttttgaaacactctgtttgtgcaatctacaattggagaattggaacgcttgcatgcccgtggtagaaaaggaaatatcctcatataaaaactagacagaaggattcacagaaaatgctttgtgatgtgtgcattcaaatcacggagttgaatctttcttttgttagagcagttttgaaacactgtttctgtggaatctgccagcggacacttggagcgctttgagggctgtggtggagaaggaaatatcttcccataaaaactagaaagaagcattctcagaaacatttatgtgaagcgtgcattcaactcacagagttgtaccttccttttgatacaacagttttgaaacactcttttgaacaattgcaggtgaatctttggagcgctttgaagcctttgttggaaatgggaatatcttcacacacaaactagccagaagcattctcagaaacttctttgtgatgtgtgcgttgaacccagagagatgaacctttcctttgatagagcagttttgaaacgtgtttttgtaagatcggcaagcggataattggcttcgctttgtgtcctttggtggaaacgggaatatcctctaataaaaactagacagagatattctcagaaacttctttgtgatgtgggcattcaactaacacagtcgaacatttcttttcacagagcagttttgaaacactcttttggtcgaatctgccagtggatatttggagcgctttgagggctattatgccaatggaaatatctgcccctaaaaactagacagaagcattctcagaaactgttttgtgatgtttgcattcaactcacagaggtgaacatacctcttcatagagcagttttgaaaacctctttttgtagaatctgcaagtggatattcggaccactttgaggccttcataggaaacagtaatatcttcacataaaaactagatagaagcattgtcagaaagttctttgtgatgtgtgaattcaactcacagagttgaaccttcctttaatagagcagttttgaaacactctttttctagaatctgcaagtagatatttggagcgctttgaagccttcgttggaaaccggaatatcttcacataaaaagtagatagagacatgctcagaaacttttatgtcatatgtagattcaactcacagcgttgaacctttcttttgatagagcagttttgaaaaactcttttatcgaatctgcaagtagacatttggagtgctttgagggctctggtgcaaaaggaaatgtcttcccatagaaactagactgaagcattctcagcaacttctttgtgacgtttgcattcatctcacagtgttgaacatacctttccatagagtacttttgaaacactgtttttgtagaatctgcaagtggatatttggactgctttgaggccttcatcggaaacgggaatatcttcacataaacactagagagaagcattctcagaaacttctttgtcatctgtccattcaactcacagagttgaaccttcctttttatggagcagttttgaaacactccttttggagaatctgcaagtggatatttggagcgctttgaggcctatggtagaaaaagaaatatctgcctctaaaaaccagacagaagcattccgagaaacttctttgtgatgtttgcattcaactagcagagttgaaccttccttttgatagggcagtttgggaacactctttttgtagaatctgcatgtggatatctggagcggtttgaggcctacggtcaaaaaggaaatatcttcctgagaaaaatagacgaaagcattctcagaaactgctttgtgatatgtgcattcgactcaccgagttgaaactttttttggatagagcagttttgaaacactctttagaatctgaaagtggatatttggagctccttgagggctatggcggaaaagaaaatatattcacattaaactagacagcagcattctcagaaacttctttaggatgtttgcagtaaactcacagagttgaacctacctttccatagagcagttttgaaacactctgtttgtgggatatgcaagtggatatttggacagctttgagaactttgctggaaatgggaatatcttcacatataaactagacagaagcattctcagaaacttcttcgtgatgtgtgcattctactcccgaatttgaatcttccttttcatgaagcagttttgaaacactctgtttgtgcaatccacaattggataattggaacgctttgatgcccatggtagaaaaggaaatatcctcatataaaaactagacagaaggattcacagaaaatgctttgtgatgtgtgcattcaaatcacggagttgaatctttcttttgttagagcagtattgaaacactgtttctgtggaatctgccagcggacacttggagcgctttgagggctacggtggagaaggaaatatcttcacataaaaactagaaagaagcattctcagaaacatgtatgtgaagcgtgaattcaactcacagtgttgaaccttccttttgatagaacagttttgaaacactcttttgaacaattgcaggtgaatctttggagcgctttgaagccagtgttggaaatgggaatatcttcacacacaaactagccagaagcattctcagaaacttctttgtgatgtgtgcgttgaacccagagagatgaacctttcctttgaaagagcagttttgaaacgtgtttttgtaagatctgcaagcggatggttggcttcgctttgtgtcctttggtggaaacgggaatatcttctaataaaaactagacagaaaatattctcagaatcttctttgtgatgtgggcattcaactaacacagttgaacatttcttttcacagagcagttttgaaacactcttttggtagaatctgccagtggatatttggagcgcttggagggctattgtgccaatggaaatatctgcccctgaaaactagacagaagcattctcagaaactacttcgtgatgtctgcattcaacacacagagttgaacatacctcttcacagagcagttttgaaaacctctttctgtagaatctgcaagtggatattcggaccactttgaggccttcataggaaacagtaatatcttcacataaaaactagatagaagcattgtcagaaagttctttgtgatgtgtgaattcaactcacagagttgaaccttcctttaatagagcagttttgaaacactcattttctagaatctgcaagtagatatttggagcgctttgaggccttcgttggaaaccggaatatcttcacaggaaatgtagatagaggcattctcagaaactttttcgtgatatgtggattcaactcacagcgttgaacctttcttttgatagagcagttttgtaaaactcttttatcgaatctgcaagtagacatttggagtgctttcagggctgtggtgcaaaaggaaatgtcttcccatagaaactagactgaagccttctcagcaacttcattgtgacgtttgcattcatctcacagtgttgaacatacctttccatagagtagttttgaagcactatttttgtagaatctgcaagtggatatttggactgctttgaggccttcatcggaaacgggaatatcttcacataaacactagacagaagcattctcagaaacttctttgtggtctgtccattcaactcacagagttgaaccttcctttttatggagcagttttgaaacactgtttttggaggatctgcaagtggatatttggagcgctttgaggcctatggtagaaaaagaaatatctgcctatgacaactagacagaagcattccgagaaacttctttgtgatgtttgcattcaactagcagagttgaaccttccttttgatggggcagtttggaaacactctttttgtagaatctgcatgtggatatctggagcggtttgaggcctacggtcaaaaaggaaatatcttcctgggaaaaatagacgaaagcattctcagaagctgctttgtgatatgtgcattcaactcaccgagttgaaactttttttggatagagcagttttgaaacactctgtagaatctgaaagtggatatttggagctctttgagggctatggcggaaaagaaaatatattcacattaaactagacagcagcattctcagagacttctttaggatgtttgcagtaaactcacagagttgaacatacctttccgtaaagcagttttgaaaccttctgtttgtgggatctgcaagtggatatttggaccgctttgagacctttgctggaaatgggaatatcttcacatataaactagacagaaacattctcagaaacttcttcgtgacgtgtgcattgtactcccaaatttgaatcttgcttctcatggagcagttttgaaacactctgtttgtgcaatctacaattggagaattggaaggcttggatgcccgtggtagaaaaggaaatatcctcatataaaaactagacagaaggattcacagaaaatgctttgtgatgtgtgcattcaaatcacggggttgaatctttctttagtcagagcagttttgaaacactgtttctgtggaatctgccagcggacacttggagcgctttcagggctatggtggagaaggaaatatcttcccataaaaactagaaagaagcattctcagaaacatttatgtgaagcgtgcattcaactcacagagttgaaccttccttttgatagaagagttttgaaacacccttttgaacaattgcaggtgaatctttggagcgctttgaagcctttgttggaaatgggaatatcttcacacacaaactagccagaagcattctcagaaacttctttgtgatgtgtgcgttgaacccagagagatgaacctttcctttgatagagcagttttgaaacgtgtttttgtaagatctgcaagcggataattggcttcgctttgtgtccttcggtggaaacgggaatatcttctaataaaaactagacagagatattctcagaaacttctttgtgatgtgggcattcaactaacacagtcgaacatttcttttcacagagcagttttgaaacactcttttggtcgaatctgccagtggatatttggagcgctttgagggctattgtgccaatggaaatatctgcccctaaaaactagacagaagcattctcagaaactacttcgtgatgtctgcattcaacacacagagttgaacatacctcttcagagagcagttttgaaaacctctttctgtagaatctgcaagtggatattcggaccactttgaggccttcataggaaacagtaatatcttcacataaaaactagatagaagcattgtcagaaagttcgttgtgatgtgtgaatttaactcacagagttgaagcttcctttaatagagcagttttgaaacactctttttctagagtctgcaagtagatatttggagcgctttgaggccttcgttggaaaccggaatatcttcacataaaaagtagatagaggcattctcagaaacttttttgtgatatgtagattcaactcacagcgttgaacctttcttttgatagagcagttttgaaaaacgcttttatcgaatctgccagtagaccttttgagtgctttgagggctgtggtgcaaaaggaaatgtcttcccatagaaactagactgaaagcattctcagcaacttcttggtgacgtttgcattcatctcacagtgttgaacatacctttccatagagtagttttgaaacactgtttttgtagaatcggcaagtggatatttggactgctttgaggccttcatcggaaacgggaatatcttcacataaacactagagagaagcatcctcagaaacttatttgtcatctgtccattcaactcacagatttgaaccttcctttttctgcagcagttttgaaacactctttttggagaatctgcaagtggatatttggagcgctttgaggcctatggtagaaaaagaaatatctgcctctaaaaaccagacagaagcattctgagaaacttctttgtgatgtttgccttcaactaccagagttgaaccttccttttgatagggcagtttggaaacactctttttgtagaatctgcatgtggatatctggagcgatttgaggcctacggtccaaaaggaaatgtcttcctgggaaagatagacgaaagcattctcagaaagtgctttgtgatatgcgcattcgactcaccgagttgaaacttttttttgatacagcagttttgaaacactctgtagaatctgaaagtggatatttggagctctttgagggctatggcggaaaagaaaatatattcacattaaagtagacagcagcattctcagaaacttctttaggatgtttgcagtaaactcgcagagttgaacatacctttccgtagagcagttttgaaacactctgtttgtgggatccgcaagtggatatttggaccgctttgagacctttgctggaaatgggaatatcttcacgtataaactagacagaagcattctcagaaacttcttcgtgatgtgtgcattctactcccgaatttgaatcttccttttcatgaagcagttttgaaacactctgtttgtgcaatccacaattggataattggaacgctttgatgtcccatggtagaaaaggaaatatcctcatataaaaactagacagaaagattcacagaaaatgctttgtgatgtgtgcattcaaatcacggagttgaatctttcttttgtcagagcagttttgaaacactgtttctgtggaatctgccagcggacacttggagcactttgagggctatggtggagaaggaaatatcttcccataaaaactagaaagaagcattctcagaaccatttatgtgaagcatgcattcaactcatagagttgaactttccttttgatagaacagttttgaaacactcttttgaacaattgcaggtgaatatttggagggctttgaagcctttgttggaaacgggaatatcttcacacacgaactagccagaagcattctcagaaacttctttgtgatgtgtgcgttgaacccagagagatgaacctttcctttgatagagcagttttgaaacgtgtttttgtaagatctgcaagcggataattggcttcgctttgtgtcctttggtggaaacgggaatatcttctaataaaaactagacagagcgatattctcagaaacttctttgtgatgtgggcattcaactaatgcagttgaacatttcttttcacagagcagttttgaaacactcttttggtcgaatctgccagtggatatttggagcgctttgagggctattgtgccaatggaaatatctgcccctaaaaactagacagaagaattctcagaaactgcttcgggatgtttgcattcaactcacagagttgaacatacctctgcatagagcagttttgaaaacctctttttgtagaatctgcaagtggatattcggaccactttgaggccttcatgggaaacagtaatatcttcacataaaaactagatagaagcattgtcagaaagttctttgtgatgtgtgaattcaactcacagagttgaaccttcctttaatagagcagttttgaaacactctttttctagaatctgccagtagatatttggagcgctttgaggccttcgttggaaaccggaatatcttcacataaaaagtagatagaggcattctcagaaacttttttgtgatatgtagattcagctcacagcgttgaacctttcttttgatagagcagttttgaaaaactcttttatcgaatctgccagtagacatttggagtgctttgagggctgtggtgcaaaaggaaatgtcttcccatggaaactagactgaatcattctcagcaacttcttggtgacgtttgcattcatctcacagtgttgaacatacctttgcatagagtagttttgaaacactatttttgtagaatctgcaagtggacatttggactgctttgaggccttcatcggaaacgggaatatcttcacataaacactagacagaagcattctcagaaacttctttgtggtctgtccattcaactcacagagttgaaccttcctttatatggagcagttttgaaaccctgtttttggagaatctgcaagtggatatttggagcgctttgaggcctatggtagaaaaagaaatatctgcctatcacagctagacagaagcattctgagaaagttctttgtgatgtttgcattcaactaccagggttgaaccttccttttgatagggcagtttggaaacactctttttgtagaatctgcatgtggatatctggagcgatttaaggcctaaggtccaaaaggaaatatcttcctgggaaaaatagacgaaagcattctcagaaagggctttgtgatatgcgcattcgactcaccgagttgaaacttttttttgatagagcagttttgaaacactctgtagaacctgaaagtggatatttggagctctttcagggctatggcggaaaagaaaatatattcacattaaagtagacagcagcattctcagaaacttctttaggatgtttgcagtaaactcacagagttgaacctacctttccgtagagcagttttgaaacactctgtttgtgggatccgcaagtggatatttgggaccgctttgagacctttgctggaaatgggaatatcttcacatataaactagacagaagcattctcagaaacttcttcgtgatgtgtgcattgtactcccaaatttgaatcttccttcttatggagcagttttgaaacactctgtttgtgcaatctacaattggagaattggaacgcttggatgcccgtggtagaaaaggaaatatcctcatataaaaactagacagaaggattcacagtaaaatgctttgtgatgtgtgcattcaaatcacggagttgaatctttcttttgtcagagcagttttgaaacactgtttctgtggaatctgccagcggacacttggagcgctttgagggctatggtggagaaggaaatatcttcccataaaaactagaaagaagcattctcagaaacatttatgtgaagcgtgcattcagctcacagagttgaaccttccttttgatagaacagttttgaaacactcttttgaacaattgcaggtgaatctttgagcgctttgaagcctttgttggaaatgggaatatcttcacacacaaactagccagaagcattctcagagacttctttgtgatgtgtgcgttgaacccagagagatgaacctttcctttgatagagcagttttgaaacgtgtttttgtaagatctgcaagcggatagttggcttcgctttgtgtcctttggtggaaacgggaatatcttctaataaaaactagacagaaatattctcacaatcgtctttgtgatgtgggcattcaactaacacagttgaacatttcttctcacagagcagttttgaaacactcttttgctagaatctgccagtggatacttggagcactttgagggctattgtgccaatggagatatcttcccctaaaaactagacagaagcattctcagaaactgcttcgggatgtttgcattcaactcacagagttgaacatacctctgcatagagcagttttgaaaacctctttttgtagaatctgcaagtggatattcggaccactttgaggccttcatgggaaacagtaatatcttcacataaaaactagatagaagcattgtcagaaagttctttgtgatgtgtgaattcaactcacagagttgaaccttccttcaatagagcagttgtgaaacactctttttctagaatctgcaagtagatacttggagcgctttgaggccttcgttggaaaccggaatatcttcacaggaaaagtagatagaggcattctcagaaacttttttgtgatatgtagattcaactcacagcgttgaacctttcttttgatagagtagttttgaaaaactcttttatcgaatctgcaagtagacatttggagtgctttgagggctgtggtgcaaaaggaaatgtcttcccatagaaactagactgaaatcattctcagcaacttcttggtgacgtttgcattcatctcacagtgttgaacatacctttgcatagagtagtttcgaaacactatttttgtagaatctgcaagtggacatttggactgctttgaggccttcatcggaaacgggaatatcttcacataaacactagacagaagcattctcagaaacttcttgtcatctgtccattcaactcacaaagttgaaccttcctttttatggagcagttttgaaacactccttttggagaatctgcaagtggatatttggagcgctttgaggcctatggtagaaaaagaaatatctgcctctaaaaaccagacagaagcattctgagaaacttctttgtgatgtttgcattcaactaccagagttgaaccttccttttgatagggcagtttggaaacactctttttgtagaatctgcatgtggatatctggagcgatttgaggcctgcggtcaaaaaggaaatatcttcctgggaaaaatagacgaaagcattctcagaaactgctttgtgatatgtgcattcgactcaccgagttgaaacttttttttggtagagcagttttgaaacactctgtagaatctgaaagtggatatttggagctctttgagggctatggcggaaaagaaaatatattcacattaaagtagacagcagcattcccagaaacttctttaggatgtttgctgtaaactcacagagttgaacatacctttccgtagagcagctttgaaacactctgtgtgtgggatccgcaagtggatatttggaccgctttgagacctttgctggaaacgggaatatcttcacatataaactggacagaagcattctcagaaacttcttcgtgatgtgtgcattctactcccaaatttgaatcttccttttcatgaagcagttttgaaacactctatttgtgcattctacaattggatgattggaacgctttgatgcccatggtagaaaaggaaatatcctcatataaaaactagacagaaagattcacagaaaatgctttgtgatgtgtgcattcaaatcacggagttgaatctttcttttgttagagcagttttgaaacactgtttctgtggaatctgccagcggacacttggagcgctttgagggctatggtggagaaggaaatatcttcacataaaaactagaaagaagcattctcagaaccatttatgtgaagcgtgcattcaactcacagagttgaaccttccttttgatagaacagttttgaaacactcttttgaacaattgcaggtgaatatttggagggctttgaagccttttttggaaatgggaatatcttcacacacaaactagccagaagcattctcagaaacttctttgtgatgtgtgcgttgaacccagaagagatgaacctttcctttgatagagcagttttgaaacgtgtttttgtaagatctgcaagcggatagttggcttcgctttgtgtcctttggtggaaacgggaatatcttctaataaaaactagacagagatattctcagaaatttctttgtgatgtgggcattcaactaacacagtcgaacatttcttttcacagagcagttttgaaacactcttttggtcgaatctgccagtggatatttggagcgctttgagggctattgtgccaatggaaatatctgcccctaaaaactagacagaagcattctcagaaactgctctgtgatgtttgcattcaactcacagagttgaacatacctcttcatagagcacttttggaaacctctttttgtagaatctgcaagtggatattcggaccactttgaggccttcataggaaacggtaatatcttcacataaaaactagatagaagcattgtcagaaagttctttgtgatgtgtggattcaactcacagagttgaaccttcctttaatagagcagttttgaaacactctttttgtagaatctgcaagtggatatttggagcgctttgaggccttcgttggaaaccggaatatcttcacaggaaaagtagatagaggcattctcagaaactctttgtgatatgtagattcaactcacagcgttgaacctttctttggatggagtagttttgaaaaactcttttatcgaatctgcaggtagacatttggggtgctttgagggctgtggtgcaaaaggaaatgtcttcccatagaaactagactgaagcattctcagcaacttcttggtgacgtttgcattcatctcacagtgttgaacatacctttccatagagtggttttgaaacactgtttttgtagaatcggctagtggatatttggacagctttcaggccttcatcggtaacgggaatatcttcacataaacactagagagaagaattctcagaaacttctttgtgatctgtccattcaactcacagagttgaaccttcctttttatggagcagttttgaaacactgtttgtggagaatctgcaggtggatatttggagcgccttgaggccaatggtagaaaaagaaatatctgcctctaaatactagactgaagcattctgagaaacttctttgtgatgtttgcattcaactaccagagttgaaccttccttttgatagggcagtttggaaacactctttttgtagaatctgcatgtggatatctggagcgatttgaggcctacggtccaaaaggaaatatcttcctgggaaaaatagacgaaagcatcctcagaaactgctttgtgatatgtgcattcgactcaccgagttgaaactttttttggatagagcagttttgaaacactctgtagaatctgaaagtggatatttggagctctttgagggctatggcggaaaagaaaatatattcacattaaacaagacagcagcattcccagaaacttctttaggatgtttgcagtaaactcacagagttgaacatacctttccgtagagcagttttgaaacactctgtttgtgggatccgcaagtggatatttggaccgctgtgagacctttgctggaaacgggaatatcttcacatataaactagacagaagcattctcagaaacttcttcgtgatgtgtgcattgtactcccaaatttgaatcttccttctcatggagcagttttgaaacactctgtttgtgcaatctacaattggataattggaacgcttggatgcccatggtagaaaaggaaatatcctcatataaaaactagatcagaaggactcacagaaaatgctttgtgatatgtgcattcagatcacggagttgaatctttcttttgttagagcagttttgaaacactgtttctgtggaatctgccagcggacacttggagcgctttgagggctatggtggagaaggaaatatcttcacataaaaactagaaagaagcattctcagaaccatttatgtgaagcgtgcgttcaactcacagagttgaaccttccttttgatagaacagttttgaaacactcttttgaacaattgcaggtgaatatttggagggctttgaagcctttgttggaaatgggaatatcttcacacacaaactagccagaaagcattctcagaaacttctttgtgatgtgtgcgttgaacccagagagatgaacctttcctttgatagagcagttttgaaacgtgtttttgtaagatctgcaagcggataattggcttcgctttgtgtcctttggtggaaacgggaatatcttctaataaaaactagacagaaatattctcagaatcttctttgtgatgtgggcattcagctaacacagttgaacgtttcttttcacagagcagttttgaaacactcttttggtagaatctgccagtggatatttggagcgctttgagggctattgtgccaatggaaatatctgcccctaaaaactagacagaagcattctcagaaattgctttgtgatgttggcattcaactcacagagttgaacatacctcttcatagagcagttttgaaaacctctttttgtagaatctgcaagtggatattcggaccactttgaggccttcataggaaacagtaatatcttcacataaaaactagatagaagcattgtcagaaagttctttgtgatgtgtgaattcaactcacagagttgaaccttcctttaatagagcagttttgaaacactctttttctagaatctgcaagtagatatttggagccctttgaggccttctttggaaactggaatatcttcacataaaaagtatatagaggcatgctcagaaacttttttgtcatatgtagattcaactcacagcgttgaacctttcttttgatagagcagttttgaaaaactcttttatcgattctgcaagtagacatttggagtgctttgagggctctggtgcaaaaggaaatgtcttcccatagaaactagactgaagcattctcagcaacttctttgtgacgtttgcattcatctcacagtgttgaacatacctttccatagagtagttttgaaacactgtttttgtagaatcggccagtggatatttggactgctttgaggccttcatcgggaacgggaatatcttcacataaacactagagagaagcattctcagaaacttctttgtcatctgtccattcaactcacagagttgaaccttcctttttatggagcagttttgaaacactccttttggagaatctgcaggtggatatttggagcgctttgaggcctatggtagaaaaagaaatatctgcctctaaaaaccagacagaagcattctgagaaaagttctttgtgatgtctgcattcaactagcagagttgaaccttccttttgatagggcagtttggaaacactctttttgtagaatctgcatgtggatatctggagcggtttgaggcctacggtcaaaaaggaaatatcttcctgggaaaaatagacgaaagcatcctcagaaactgctttgtgatatgtgcattcgactcactgagttgaaactttttttggatagagcagttttgaaacactctgtagaatctgaaagtggatatttggagctctttgagggctatggcggaaaagaaaatatattcacattaaactagacagcagcattctcagaaacttctttaggatgtttgcagtaaactcacagagttgaaacctacctttccgtagagcagttttgaaacactctgtttgtgggatccgcaagtagatatttggaccgctttgagacctttgctggaaatgggaatatcttcacatataaactagacagaagcattctcagaaacttcttcgtgatgtgtgcattctactcccaaatttgaatcttccttttcatgaagcagttttgaaacactctatttgtccaatctacaatgggataattggaacgctttgatgcccatggtagaaaaggaaatatcctcatataaaaactagacagaaggattcacagaaaatgctttgtgatgtgtgcattcaaatcacggagttgaatctttcttttgttagagcagttttgaaacactgtttctgtggaatctgccagcggacactaggagcgctttgagggctatggtggagaaggaaatatcttcacataaaaactagaaagaagcattctcagaaccatttatgttaagcgtgcattcaactcacagagttgaaccttccttttgatagaacagttttgaaacactcttttgaacaattgcaggtgaatatttggagggctttgaagcctttgttggaaatgggaatatcttcacacacaaactagccagaagcattctcagaaacttctttgtgatgtgtgcgttgaacccagggagatgaacctttcctttgatagagcagttttgaaacgtgtttttgtaagatctgcaagcggatagttggcttcggtttgtgtcctttggtggaaacgggaatatcttctaataaaaactagacagaaatattctcagaatcttctttgtgatgtgggcattcagctaacacagttgaacgtttcttttcacagagcagttttgaaacactcttttggtagaatctgccagtggatatttggagcgctttgagggctattgtgccaacggaaatatctgcccctaaaaactagacagaagcattctcagaaactgctttgggatgtttgcattcaactcacagagttgaacatacctcttcatagagcagttttgaaaacctctttttgtagaatctgcaagtggatattcggaccactttgaggccttcataggaaacagtaatatcatcacataaaaactagatagaagcattgtcagaaagttctttttgatgtgtgaattcaactcacagagttgaaccttccttcaatagagcagttgtgaaacactctttttctagaatctgcaagtagatacttggagcgctttgaggccttcgttggaaaccggaatatcttcacaggaaaagtagatagaggcatgctcagaaacttttttgtcatatgtagattcaactcacagcgttgaacctttcttttgatagagcagttttgaaaaactcttttatcgaatctgcaagtagacatttggagtgctttgacggctctggtgcaaaaggaaatgtcttcccatagaacctagactgaatcattctcagcaacttcttggtgacgtttgcattcatctcacagtgttgaacatacctttgcatagagtagtttcgaaacactatttttgtagaatctgcaagtggacattcggactgctttgaggccttcatcggaaacgggaatatcttcacataaacactagacagaagcattctcagaaacttctttgtggtctgtccattcaactcacagagttgaaccttcctttttatggagcagttttgaaacactgttttcggaggatctgcaagtggatatttggagcgctttgaggcctatggtagtaaaagaaatatctgcctatgacaactagacagaagcattccgagaaaagttctttgtgatgtttgcattcaactagcagagttgaaccttccttttgatagggcagtttggaaacactctttttgtagaatctgcatgtggatatctggagcggtttgaggcctacggtcaaaaaggaaatatcttcctgggaaaaatagacgaaagcattctcagcaaagggctttgtgatatgcgcattcgactcaccgagttgaaacttttttttgatagagcagttttgaaacactctgtagaacctgaaagtggatatttggagctctttcagggctatgacggaaaagaaaatatattcacattaaagtagacagcagcattctcagaaacttctttaggatgtttgcagtaaactcacagagttgaacctacctttccgtagagcagttttgaaacactctgtttgtgggatccgcaagtggatatttggaccgctttgagacctttgctggaaatgggaatatctgcacatttaaactagacagaagcattctcagaaacttcttcgtgatgtgtgcattctcctcccgaatttgaatcttcctttttatgaagcagttttgaaacactctgtttgtgcaatccacaattggataattggaacgctttgatgcccatggtagaaaaggaaatatcctcatataaaaactagacagaaggattcacagaaaatgctttgtgatgtgtgcattcaaatcacggagttgaatctttcttttgtcagagcagttttgaaacactgtttctgtggaatctgccagcggactcttggagctctttgagggctatggtggagaaggaaatatcttcccataaaaactagaaagaagcattctcagaaacatttatgtgaagcgtgcattcaactcacagagttgaaccttccttttgatacaacagttttgaaacactcttttgaacaattgcaggtgaatctttggagcgctttgaagcctttgttggaaatgggaatatcttcacacacaaactagccagaagtattcccagaaacttctttgtgatgtgtgcgttgaacccagagagatgaacctttcctttgatagagcagttttgaaacgtgtttttgtaagatctgcaagcggataattggctttgctttgtgtcccttggtggaaacgggaatatcttctaataaaaactagacagagatattctcagaaacttctttgtgatgtgggcattcaactaacacagtcgaacatttcttttcatgaagcagttttgaaacactcttttggacgaatctgccagtggatatttggagcgctttgagggctattgtgccaatggaaatatctgcccctaaaaactagacagaagcattctcagaaactgctttgggatgtctgcattcaactcacagagttgaacatacctcttcatagagcagtttcgaaaacctctttttgtagaatctgcaagtggatattcggaacactttgaggccttcataggaaacagtaatatcatcacataaaaactagatagaagcattgtcagaaagttctttgtgatgtgtgaattcaacacacagagttgaaccttcctttaatagagcagttttgaaacactctttttctagaatctgccagtagatatttggagcgctttgaggccttcgttggaaaccggaatatcttcacataaaacgtagatagaggcattctcagaaactttttcgtgatatgtggattcaactcacagcgttgaacctttcttttgatagagcagttttgtaaaactcttttatcgaatctgcaagtagacatttggagtgcgttgagggctgtggtgcaaaaggaaatgtcttcccatagaaagtagactgaagcattctcagcaacttcttggtgacgtttgcattcatctcacagtgttgaacatacctttacatagagtggttttgaaacactgtttttgtagaatcggcaagtggatatttggactgctttgaggccttcatcggaaacgggaatatcttcacttaaacactagagagagaagcattctcagaaacttctttgtggtctgtccattcaactcacagagttgaaccttcctttttatggagcagttttgaaacactgtttttggaggatctgcaagtggatatttggagcgctttgaggcctatggtagaaaaagaaatatctgcctatgacaactagacagaagcattctgagaaacttctttgtgatgtttgcattcaactaccagagttgaaccttccttttgatagggcagtttggaaacactctttttgtagaatctgcatgtggatatctggagcgatttgaggcctatggtcaaaaaggaaataacttcctgggaaaaatagacgaaagcattctcagaaactgctttgtgatatgtgcattcgactcaccgagttgaaacttttttttgatagagcagttttgaaacactctgtagaatctgaaagtggatatttggagctctttgagggctatggcagaaaagaaaatatattcacattaaagtagacagcagcatcctcagaaacttctttatgatgtttgcattaaactcacagagttgaacatacctttccatagagcagttttgaaacactctttttggggaatccgcaagtggatatttggaccgctttgagacctttgctggaaatgggaatatcttcacatataaactagacagaagcattctcagaaacttcttggtgatgtgtgcattgtactcccaaatttgaatcttccttctcatggagcagttttgaaacactctgtttgtgcaatctacaattggagaattggaacgcttggatgcccgtggtagaaaaggaaatatcctcatataaaaactagacagaaggattcacagaaaatgctttgtgatgtgtgcattcaaatcacggagttgaatctttcttttgtcagagcagttttgaaacactgtttctgtggaatctgccagcggacacttggagcgctttgagggctacggtggagaaggaaatatcttcacataaaaactagaaagaagcattctcagaaacatttctgtgaagcatgcattcaactcacagagttgaaccttccttttgttagaacagttttgaaaaactcttttgaacaattgcaggtgaatatttggagcgctttgaagcctttgctggaaatgggaatatcttcacgcacaaagtagccagaagcattctcagaaacttctttgtgatgtgtgcgttgaacccagagagatgaaccttttcctttgatagagcagttttgaaacgtgtttttgtaagatcggcaagtggataattggcttcgctttgtgtcctttgttggaaacgggaatatcttctaataaaaactagacagaaatattctcacaatcatctttgtgatgtgggcattcaactaacacagttgaacatttcttttcacagagccgttttgaaacactcttttgctagaatctgccagtggatacttggagcgctttgagggctattgtgccaatggagatatcttcccctaaaaactagacagaagcattctcagaaactacattgtgatgtttgcattcgactcacagagttgaacatacctcttcatagagcagttttgaaaaccttttttgtagaacctgaaagtggatattcggtcctctttgaagccttcataggaaacagtaatatcttcacataaaacctagctagaagcattgtcagaaagttctttgtgatgtgtgaattcaactcacagagttgaaccttcctttaatagagaagttttgaaacactctttttctagaatctgcaagtagatatttggagcgcttggaggccttcgttggaaaccggaatatcttcacaggaaatgtagatagaggcatgctcagaaacttttttgtcatatgtagattcaactcacagcgttgaacctttcttttgatagagcagttttgaaaaactcttttatcgaatctgcaagtagacatttggagtgctttgagggctctggtgcaaaaggaaatgtcttcccatagaaagtagactgaagcattctcagcaacttcttggtgacgtttgcattcatctcacagtgttgaacatacctttccctagagtggttttgaaacactgtttttgtagaatcggcaagtggatatttggactgctttgaggccttcatcggaaaagggaatatcttcacataaacactagagagaagcattctcagaaacttctttgtggtctgtccattcaactcacagagttgaaccttcctttttatggagcagttttgaaacactgttttcggagaatctgcaagtggatatttggagcgctttgaggcctatggtagaaaaagaaatatctgcctatgacaactagacagaagcattctgagaaacttctttgtgatgtttgcattgaactaccagaggtgaaccttccttttgatagggcagtttggaaacactctttttgtagaatctgcatgtggatatctggagcgatttgaggcctacggtccaaaaggaaatatcttcctgggaaaaatagacgaaagcattctcagaaactgctttgtgatatgtgcattcgactcaccgagttgaaactttttttggatagagcagttttgaaacactctgtagaatctgaaagtggatatttggagctctttgagggctatggcggaaaagaaaagatattcacattaaactagacagcagcattcccagtaaacttctttaggatgtttgcagtaaactcacagagttgaacatacctttccgtagagcagttttgaaacactctgtttgtgggatccgcaagtggatatttggaccgctttgagacctttgctggaaacgggaatatcttcacatataaactggacagaagcattctcagaaacttcctcgtgatgtgtgcattctactcccgaatttgaatcttccttttcatgaagcagttttgaaacactctgtttgtgcgatccacaattggataattggaacgctttgatgcccatggtagaaaaggaaatatcctcatatgaaaactagacagaaggattcacagaaaatgctttgtgatgtgtgcattcaaatcacggagttgaatctttcttttgttagagcagttttgaaacactctttctgtggaatctgccagcggacacttggagcgctttgagggctatggtggagaaggaaatatcttcacataaaaactagaaagaagcattctcagaaacatttatgtgaagcgtgcattcaactcacagcagttgaaccttccttttgatacaacagttttgaaacactcttttgaacaattgcaggtgaatctttggagcgctttgaagcctttgttggaaatgggaatatcttcacacacaaactagccagaagcattctcagaaacttctttgtgatgtgtgtgttgaacccagagagatgaacctttccttcgatagagcagttttgaaacgtgtttttgtaagatcggcaagcggataattggcttcgctttgtgtcctttggtggaaacgggaatatcttctaataaaaactagacagaaatattctcagaatcttctttgtgatgtgggcattcaacaaacacagttgaacgtttcttttcacagagcagttttgaaacactcttttggtagaatctgccagtggatatttggagcgctttgagggctattgtgccaatggaaataacttcccctaaaaactagacagaagcattctcagaaactgctttgtgatgtttgcattcaactcacagagttgaacctacctcttcatagagcagtttggaaaacctcttcttgtagaatctgcaagtggatattcggaccactttgaggctttcataggaaacagtaatatcttcacataaaaactagatagaagcattgtcagaaagttctttgtgatgtgtgaattcaactcacagagttgaaccttcctttaatagagcagttttgaaacactcttcttctagaatctgcaagtagatatttggagcgttttgaggccttcgttggaaaccggaatatcttcacagaaaaagtagatagaggcattctcagaaactttttcgtgatatgtggattcaactcaaagcgttgaacctttcttttgatagagcagttttgtaaaactcttttatcgaatctgcaagtagacatttggagtgctttgggggctgtggtgcaaaaggaaatgtcttcccatagaaactagactgaagcattctcagcaacttctttgtgacgtttgcattcatctcacagtgttgaacatacctttccatagagtagttttgaaacactgtttttgtagaatcgggaagtggatatttggactgctttgaggccttcatcggaaacgggaatatcttcacataaacactagagagaagcatcctcagaaacttctttgtcatctgtccattcaactcacagagttgaaccttcctttttctggagcagttttgaaacactctttttggagaatctgcaagtggatatttggagcgctttgaggcctatggtagaaaaataaatatctgcctctaaaaaccagacagaagcattccgagaaacttctttgtgatgtttgcattcaactagcagagttgaacctttcttttgatagggcagtttggaaacactctttttgtagaatctgcatgtggatatctggagcggtttgaggcctacggtcaaaaaggaaatatcttcctgggaaaaatagacgaaagcattctcagaaactgctttgtgatatgggcattcgactcaccgagttgaatcttttttttgatagagcagttttgaaacactctgtagaatctgaaagtggatatttggagctctttgagggctatggcggaaaagaaaatatattcacattaaactagagaggagcattctcagaaacttctttaggatgtttgcagtaaactcacagagttgaacatacctttccgtagagcagttttgaaacactctgtttgtgggatccgcaagtggatatttggaccgctttgagaactttgctggaaatggcaatatcttcacgtattaactagacagaagcattctcagaaacttcttcgtgatgtgtgcattctactcccgaatttgaatcttccttttcatgaagcagttttgaaacactctgtttgtgcaatccacaattggataattggaacgctttgatgcccatggtagaaaaggaaatatcctcatataaaaaccagacggaaggattcacagaaaatgctttgtgatgtgtgcattcaaatcgcggagttgaatctttcttttgttagagcagttttgaaacactgtttctgtggaatctgccagcggacacttggagcgctttgagggctatggtggagaaggaaatatcttcacataaaaactagaaagaagcattctcagaaacatttatgtgaagcgtgcattcaactcacagagttgaaccttccttttgatacaacagttttgaaacattcttttgaacaattgcaggtgaatctttggagcgctttgaagcctttgttggaaatgggaatatcttcacacacaaactagccagaagcattctcagaaacttctttgtgatgtgtgcgttgaacccagagagatgaacctttccttcgatagagcagttttgaaacgtgtttttgtaaggtcggcaagcggataaatggcttcgctttgtgtcctttggtggaaacgggaatatcttctaataaaaactagacagaaatattctcagaatctcctttgtgatgtgggcattcaactaacacagttgaacatttcttttcacagggcagttttgagacactcttttggtagaatctgccagtggatatttggagcgctttgagggctgttgtgccaatggaaatatctgcccctaaaatctagacagaagcattctctgaaactactttgtgatgtttgcattcaactcacagagttgaacatacctcttcatagagcagttttgaaaacctctttttgaagaatctgcaagtggatattcggaccactttgaggccttcataggaaacagtaatatcttcacataaaaactagatagaagcattgtcagaaagttctttgtgatgtgtgaattcaactcacagagttgaaacttcctttaatagagcagttttgaaacactctttttctagaatctgcaagtagatatttggagcgctttgaggccttctttggaaaccggaatatcttcacataaaaagtagatagaggtattctcagaaacttttttgtgatatgtagattcaactcacagcgttgaacctttcttttgatagagcagttttgaaaaactcttttatcgaatctgcatgtggacatttggagtgctttgagggctgtggtgcaaaaggaaatgtcttcacatagaaactagactgaagcattctcagcaacttctttgtgacgtttgcattcatctcacagtgttgaacatacctttccatagagtagttttgaaacactatttttgtagaatctgcaagtggatatttggactgctttgaggccttcatcggaaacgggaatatcttcacataaacactagacagaagcattctcagaaacttctttgtgatctgtccattcaactcacagagttgaaccttcctttttatggagcagttttgaaacactgtttttggagaatctgcaagtagatatttggagcgctttgtggcctatggtagaaaaagaaatatctgcctataacagctagacagaagcattccgagaaacttctctgtgatgtttgccttcaactagcagagttgaaccttccttttgatagggcagtttggaaacactctttttgtagaatctgcatgtggatatctggagcggtttgaggcctacggtcaaaaaggaaatatcttcctgggaaaaatagacgaaagcattctcagaaactgctttgtgatatgtgcattcgactgaccgagttgaaacttttttttgatagagcagttttgaaacactctgtagaatctgaaagtggatatttggagctctttgagggctatggcggaaaagaaactatattcacattaaagtagacagcagcattctcagcaaacatctttaggatgtttgcagtaaactcacagagttgaacatacctttccgtaaagcagttttgaaaccctctgtttgtgggatctgcaagtggatatttggaccgctttgagacctttgctggaaatgggaatatcttcacatataaactagacagaagcattctcagaaacttcttcgtgatgtgtgcattgtactcccaaatttgaatcttccttctcatggagcagttttgaaacactctgtttgtgcaatctacaattggagaattggaacgcttggatgcccgtggtagaaaaggaaatatcctcatacaaaaactagacagaaggattcacagaaaatgctttgtgatgtgtgcattcaaatcacggagttgaatctttcttttgttagagcagttttgaaacactgtttctgtggaatctgccaggggacacttggagcgctttgagggctatggtggagaaggaaatatcttcacataaaaactagaaagaaatattctcagaaatcttctttgtgatgtgggcattcaactaacacagttgaacatttcttttcacagaacagttttgaaacactcttttgaacaattgcaggtgaatctttggaacgctttgaagcctttgttggaaataggaatatattcacacacaaactagccagaagcattctcagaaacttctttgtgatgtgtgcgttgaacccagagagatgaacctttcctttgatagagcagttttgaaacgtgtttttgtaagatctgcaagcagataattggcttcgctttgtgtcctttggtggaaacgggaatatcttctaataaaaactagacagaaatattctcagaatctcctttgtgatgtgggcattcaactaacacagttgaacatttcttttcacagagcagttttgaaacactcttttggtagaatctgccagtggatatttggagcgcttggagggctattgtgccaatggaaatatctgcccctaaaaactagacagaagcattctcagaaactacttcgtgatgtttgcattcaacacacagagttgaacatacctcttcacagagcagttttgaaaacctctttctgtagaatctgcaagtggatattcggaccactttgaggccttcataggaaacagtaatatcttcacataaaaactagacagaagcattgtcagaaagttctttgtgatgtgtgaattcaactcacagagttgaaccttcctttaatagagcagttttgaaacactctttttctagaatctgcaagtagatatttggagcgctttgaggccttcgttggaaaccggaatatcttcacataaaaagtagatagaggcatgctcagcaaacttttttgtcatatgtagattcaactcacagcgttgaacctttcttttgatagagcagttttgaaaaactcttttatcgaatctgcaagtagacatttggagtgctttgagggctctggtgcaaaaggaaatgtcttcccatagaaactagactgaagcattctcagcaacttcttggtgacgtttgcattcatctcacagtgttgaacatacctttagatagagtggttttgaaacactgtttttgtagaatcggcaagtggatatttggactgctttgaggccttcatcggaaacgggaatatcttcacataaacactagagagaagcattctcagaaacttctttgtcatctgtccattcaactcacagagttgaaccttcctttttatggagcagttttgaatcactccttttggagtatctgcaggtggatatttggagcgctttgaggcctatggtagaaaaagaaatatctgcctctaaaaaccagacagaagcattctgaggaaacttctttgtgatgtttgcattcaactaccagagttgaaccttccttttgatagggcagtttggaaacagtctttttgtagaatctgcatgtggatatctggagcgatttgaggcctacggtccaaaaggaaatatcttcctgggaaaaatagacgaaagcatcctcagaaactgctttgtgatatgtgcattcgactcaccgagttgaaactttttttggatagagcagttttgaaacactctgtagaatctgaaagtggatatttggagctctttgagggctatggcggaaaagaaaatatattcacattaaactagacagcagcattcccagaaacttctttaggatgtttgcagtaaactcacagagttgaacatacctttccgtagagcagttttgaaacactctgtttgtgggatccgcaagtgaatatttggacccctttgagacccttgctggaaacgggaatatcttcacatataaactagacagaagcattctcagaaacttctttgtgatgtgtgcattctacacccaaatttgaatcttccttttcatgaagcagttttgaaacactctatttgtgcaatctacaattggataattggaaatctttgatgcccatggtagaaaaggaaatatcctcatataaaaactagacagaaggattcacagaaaatgctttgtgatgtgtgcattcaaatcacggagttgaatctttcttttgttagagcagttttgaaacactgtttctgtggaatctgccagcggacacttggagcgctttgaaggctatggtggagaaggaaatatcttcacataaaaactagaaagaagcattctcagaaacatttatgtgaagcgcgcattcaactcacagagttgaaccttccttttgatacaacagttttgaaacactcttttgaacaattgcaggtgaatctttggagcgctttgaagcctttgttggaaatgggaatatcttcacactcaaactagccagaagcattcccagaaacttctttgtgatgtgtgcgttgaacccagagagatgaacctttcctttcatagagcagttttgaaacgtgtttttgtaagatcggcaagcggataagtggcttcgctttgtgtcctttggtggaaacgggaatatcttctaataaaaactagacagaaatattctcagaatcttctttgtgatgtgggcattcaactaacacagttgaacatttcttttcacagagcagttttgaaacactcttttggtagaatctgccagtggatatttggagcgctttgagggctattgtgccaatggaaatatctgcccctaaaaactagacagaagcattctcagaaactgcttcgtgatgtttgcattcaactcacagacttgaacatacctctgcatagagcagttttgaaaacctctttttgtagaatctgcaagtggatattcggaccactttgaggccttcataggaaacagtaatatcttcacataaaaactagatagaagcattgtcagaaagttctttgtgatgtgtgaattcaactcacagagttgaaccttcctttaatagagcagttttgaaacactctttttctagaatctgcaagtcgatatttggagcgctttgaggccttctttggaaaccggaatatcttcacataaaaagtagatagaggcattctcagaaacttttttgtgatatgtagattcaactcacagcgttgaacctttctttggatggagcagttttgaaaaacccttttatcgaatctgcaggtagacatttggggtgctttgagggctgtggtgcaaaaggtaatgtcttcccatagaaactagactgaagcattctcagcaacttctttgtgacgtttgcattcatctcacagtgttgaacatacctttccatagagtagttttgaaacactatttttgtagaatctgcaagtggatatttggactgctctgaggccttcatcggaaacgggaatatcttcacataaacactagacagaagcattctcagaaacttctttgtggtctgtccattcaattcacagagttgaaccttcctttttatggagcagttttgaaacactgtttttggagaatccgcaagtggatatttggagcgcttagaggcctatggtagaaaaagaaatatctgcctatgacaactagacagaagcattctgagaaacttctttgtgatgtttgcattcaactaccagagttgaaccttccttttgatagggcagtttggaaacactcttttcgcagaatctgcatgtggatatctggagcgatttgaggcctactgtccaaaaggaaatatcttcctgggaaaaatagacgaaagcattctcagaaactgctttgtgatatgtgcattcgactcaccgagttgaaactttttttggatagagcagttttgaaacactctgtagaatctgaaagtggatatttggagctctttgagggctatggcggaaaagaaaatatattcacattaaactagacagcagcattctcagaaacttctttaggatgtttgcagtaaactcaaagagttgaacatacctttccgtagagcagttttgaaacactctgtttgtgggatccgcaagtggatatttggaccgctttgagacctttgctggaaatgggaatacctgcacatttacactagacagaagcattctcagaaacttcttcgtgatgtgtgcattctactcccaaatttgaatcttccttttcatgaagcagttttgaaacactctgtttgtgcaatccacaattggataattggaacgctttgatgcccatggtagaaaaggaaatatcctcatataaaaactagacacaaggattcacagaaaatgctttgtgatgtgtgcattcaaatcacggagttgaatctttcttttgtcagagcagttttgaaacactgtttctgtggaatctgccagcggacacttggagcgctttgagggctatggtggagaaggaaatatcttccctaaaaattagaaagaagcattctcagaaacatttatgtgaagcgtgcattcaactcacagagttgaaccttccctttcatacaacagttttgaaacactcttttgaacaattgcaggtgaatctttggagcgctttgaagcctttgttggaaatgggaatatcttcacacacaaactagccagaagcattctcagaaacttctttgtgatgtgtgcgttgaacccagagagatgaacctttcctttgatagagcagttttgaaacgtgtttttgtaagatctgcaagcggataattggcttcgctttgtgtcctttggtggaaacgggaatatcttctaataaaaactagacagaaatattctcagaatcttctttgtgatgtgggcattcaactaacacagttgaacctttcttttcacagagcagttttgaaacacccttttggtagaatctgccagtggatatttggagcgctttgagggctattgtgccaacggaaatatctgcccctaaaaactagacagaagcattctcagtaaactactttgtgatgtttgcattcaactcacagagttgaacatacctcttcatagagcagttttgaaaacctctttttgtagaatctgcaagtggatattcggaccactttgaggccttcataggaaacagtaatatcttcacataaaaactagatagaagcattgtcagaaagttcgttgtgatgtgtgaattcaactcacagagttgaagcttcctttaatagagcagttttgaaacactctttttctagaatctgcaagtagatatttggagcgctttgaggccttcgttggaaaccggaatatcttcacataaaaagtagatagaggcattctcagaaactttttgtgatatgtagattcaactcacagcgttgaacctttctttggatggagcagttttgaaaaactcttttatcgaatctgcaggtagacatttggggtgctttgagggctgtggtgcaaaaggaaatgtcttcccatagaaactagactgaagcattctcagcaacttcttggtgacgtttgcattcatctcacagtgttgaacatacctttccatagagtggttttgaaacactgtttttgtataatcggcaagtggatatttggactgctttcaggccttcatcggaaacgggaatatcttcacataaacactagagagaagcattctcagaaacttctttgtgatctgtccattcaactcacagagttgaaccttcctttttatggagcagttttgaatcactgtttttggagaatctgcaagtggatatttggagcgctttgaggcctatggtagaaaaagaaatatctgcctctaaaaaccagacagaagcattccgagaaacttctttgtgatgtttgcattcaactagcagagttgaaccttccttttgatagggcagtttggaaacactctttttgtagaatctgcatgtggatatctggagtggtttgaggcctacggtcaaaaaggaaatatcttcctgggaaaaatagacgaaagcattctcagaaactgctttgtgatatgtgcattcgactcaccgagtttaaacttttttttgatagagcagttttgaaacactctgtagaatctgaaagtggatatttggagctctttgagggctatggcggaaaagaaaatatattcacattaaagtagacagcagcattctcagaaacttctttaggatgtttgcagtaaactcacagagttgaacatacctttccgtaaagcagttttgaaacactctgtttgtgggatccgcaagtggatatttggaccgctttgagacctttgctggaaatgggaatatcttcacatataaactagacagaagcattctcagaaacttcttcgtgatgtgtgcattgtactcccaaatttgaatcttccttctcatggagcagttttgaaacactctgtttgtgcaatctacaattggagaattggaacgcttggatgcccgtggtagaaaaggaaatatcctcatataaaaactagacagaaggattcacagaaaatgctttgtgatgtgtgcattcaaatcacggagttgaatctttcttttgtcagagcagttttggaacactgtttctgtggaatctgccagcggacacttggagcgctttgagggctatggtggagaaggaaatatcttcccataaaaactagagagaagcattctcagaaacatttatgtgaagcgtgcattcaactcacagagttgaaccttccttttgatacaacagttttgaaacactcttttgaacaattgcaggtgaatctttggagcgctttgaagcctttgttggaaatgggaatatcttcacacacaaactagccagaagcattctcagaaacttctttgtgatgtgtgcgttgaacccagagagatgaacctttccttcgatagagcagttttgaaacgtgtttttgtaagttcggcaagcggataattggcttcgctttgtgtcctttggtggaaacgggaatatcttctaataaaaactagacagagatattctcagaaacttctttgtgatgtgggcattcaactaacacagtcgaacatttcttttcacagagcagttttgaaacactcttttggacgaatctgccagtggatatttggagcgctttgagggctattgtgccaatggaaatatctgcccctaaaaactagacagaagcattctcagaaattactttgtgatgtttgcattcaactcacagatttgaacatacctcctcatagagcagttttgaaaacatctttttgtagaatctgcaagtggatattcggaccactttgaggccttcataggaaacagtaatatcttcacagaaaaactagatagaagcattgtcagaaagttctttgtgatgtgtgaattcaactcacagagttgaaccttcctttaatagagcagttttgaaacactctttttctagaatctgcaagtagatatttggagcgctttgaggccttctttggaaaccggaatatcttcacataaaaagtagatagaggcattctcagaaactctttgtgatatgtagattcaactcacagcgttgaacctttctttggatggagcagttttgaaaaactcttttatcgaatctgcaggtagacatttggggtgctttgagggctgtggtgcaaaaggaaatgtcttcccatagaaactagcctgaagcattctcagcaacttcttggtgacgtttgcattcatctcacagtgttgaacatacctttccatagagtggttttgaaacactgtttttgtagaatcggcaagtggatatttggactgctttcaggccttcatcggaaacgggaatatcttcacataaacactagagagaagcattctcagaaacttctctgtcatctgtccattcaactcacagagttgaaccttcctttttatggagcagtttggaaacactccttttggagaatctgcaagtggatatttgcagcgctttgaggcctatggtagaaaaagaaatatctgcctctgaaaaccagacagaagcattccgagaaacttctctgtgatgtttgcattcaactagcagagttgaaccttccttttgatagggcagtttggaaacactctttttgtagaatctgcatgtggatatctggagcggtttgaggcctacggtcaaaaaggaaatatcttcctgggaaaaatagacaaaagcattctcagaaactgctttgtgatatatgcattcgactcaccgagttgaaacttttttttgatagagcagttttgaaacactctgtagaatctgaaagtggatatttggagctctttgagggctatggcggcaaagaaactatattcacattaaagtagacagcagcattcccagaaacttctttaggatgtttgcagtaaactcacagagttgaacatacctttccgtagagcagttttgaaacactctgtttgtgggatccgcaagtggatatttggacccctttgagacctttgctggaaacgggaatatcttcacatataaactagacagaagcattctcagacacttcttggtgatgtgtgcattgtactcccaaatttgaatcttccttctcatggagcagttttgaaacactctgtttgtgcaatctactattggagaattggaacgcttggatgcccgtggtagaaaaggaaatatcctcatataaaaactagacagaaggattcacagaaaatgctttgtgatgtgtgcattcaaatcacggagttgaatctttcttttgttagagcagttttgaaacactgtttctgtggaatctgccagcggacacttggagcactttgagggctacggtggagaaggaaatatcttcacataaaaactagaaagaaagcattctcagaaccatttatgtgaagcgtgcattcaactcacagtagttgaaccttccttttgatagaacagttttgaaacactcttttgaacaattgcaggtgaatatttggagggctttgaagcctttgttggaaatgggtatatcttcacacacaaactagccagaagcattctcagaaacttctttgtgatgtgtgcgttgaacccagagagatgaaccattcctttgatagagcagttttgaaacgtgttttgtaagatctgcaagcggatagttggcttcgctttgtgtcctttggtggaaacgggaatatcttctaataaaaactagacagaaatattctcagaatctcctttgtgatgtgggcattcaactaacacagttgaacatttcttttcacagagcagttttgaaacactcttttggtagtatctgccagtggatatttggagcgcttggagggctattgtgccaatggaaatatctgcccctgaaaactagacagaagcattctcagaaactacttcgtgatgtttgcattcaacacacagagttgaacatacctcttcacagagcagttttgaaaacctctttctgtacaatctgcaagtggatattcggaccactttgaggccttcataggaaacagtaatatcttcacataaaaactagacagaagcattgtcagaaagttctttgtgatgtgtgaattcaactcacagagttgaaccttcctttaatagagcagttttgaaacactctttttctagaatctgcaagtagatacttggagcgctttgaggccttcgttggaaaccggaatatcttcacaggaaaagtagatagaggcattctcagaaacttttttgtgatatgtagattcaactcacagcgttgaacctttctttggatggagcagttttgaaaaactcttttatcgaatctgcaggtagacatttggggagctttgagggctgtggtgcaaaaggaaatgtcttcccatagaaactagactgaagcattctcagcaacttctttgtgacgtttgcattcatctcacagtgttgaacatacctttccatagagtagttttgaaacactgtttttgtagaatctgcaagtggatatttggaatgctttgaggccttcatcggaaacgggaatatcttcacataaacactagagagaagcattctcagaaacttctttgtgatctgtccattcaactcacagaggtgaaccttcctttttatggagcagttttgaaacactgtttttggagaatctgcaagtggatatttggagcgctttgaggcctatggtagaaaaagaaatatctgcttctaaaaaccagacagaagcattctgagcaaacttctttgtgatgtttgcattcaactaccagagttgaaccttccttttgatagggcagtttggaaacactctttttgtagaatctgcatgtggatatctggagcgatttgaggcctacggtccaaaaggaaatatcttcctgggaaaaatagacgaaagcattctcagaaactgctttgtgatatgtgcattcgactcaccgagttgaaacttttttttgatagagcagttttgaaacactctgtagaatctgaaagtggatatttggagctctttgagggctatgtcggaaaagaaaatatattcacattaaagtagacagcagcattctcagaaacttctttaggatgtctgcagtaaactcacagagttgaacatacctttccgtagagcagttttgaaacactctgtttgtgggatccgcaagtggatatttggacagctttgagatctttgctggaaatgggaatatcttcacatataaactagacagaagcattctcagaaacttcttcgtgatgtgcgcattctactcccaaatttgaatcttccttctcatgaagcagttttgaaacactctatttgtgcaatctacaattggataattggaaccctttgatgcccatggtagaaaaggaaatatcctcatataaaaactagacagaaggattcacagaaaatgctttgtgatgtgtgcattcaaatcacggagttgaatctttcttttgttagagcagttttgaaacactgtttctgtggaatctgccagcggacacttggagtgctttgagggctatggtggagaaggaaatatcttcacataaaaactagaaagaagcattctcggaaacatttatgtgaagcgtgccttcaactcacagagttgaaccttccttttgatagaacagttttgaaacactcttttgaacaattgcaggtgaatcctttggagcgctttgaagcctttgttggaaatgggaatatcttcacacacaaactagccagaagcattctcagaaacttctttgtgatgtgtgcgttgaacccagagagatgaacctttcctttgatagagcagttttgaaacgtgtttttgtaagatcggcaagtggataattggcttcgctttgtgtcctttggtggaaacgggaatatcttctaataaaaactagacagaaatattctcagaatcttctttgtgatgtgggcattcagctaacacagttgaacgtttcttttcacagagcagttttgaaacactcttttggtagaatctgccagtggatatttggagcgatttgagggctattgtgccaatggaaatatctgcccctaaaaactagacagaagcattctcagaaactgctttgtgatgtttgcattcaactcacagtgttgaacctacctcttcatagagcagtttggaaaacctcttcttgtagaatctgcaagtggatattcggaccactttgaggccttcataggaaacagtaatatcttcacataaaaactagatagaagcattgtcagaaagttctttgtgatgtgtgaattcaactcacagagttgaaccttcctttaatagagcagttttgaaacactctttttctagaatctgcaagtagatatttggagcgctttgaggccttcgttggaaagcggaacatcttcacaggaaaagtagatagaggcattctcagaaacttttttgtgatatgtagattcaactcacagcgttgaacctttctttggatggagcagttttgaaaaactcttttatcgaatctgcaggtagacatttggggtgctttgagggctgtggcgcaaaaggaaatgtcttcccatagaaactagactgaagcattctcagcaacttctttgtgacgtttgcattcatctcacagtgttgaacatacctttccatagggtagttttgaagcactatttttgtagaatctgcaagtggatatttggactgctttgtggccttcatcggaaaggggaatatcttcacataaacactagacagaagcattctcagaaacttctttgtgatctgtccattcaactcacagagttgaaccttcctttttatggagcagttttgaaacactgtttttggagaatctgcaagtggatatttggagcgccttgaggcctatggtagaaaaagaaatatctgcctctaaaaactagacagaagcattctgagaaacttctttgtgatgtttgcattcatataccagagttgaacctttcttttgatagggcagtttggaaacactctttttgtagaatctgcatgtggatatctggagcgatttgaggcctacggtccaaaaggaaatatcttcctgggaaaaatagacgaaagcattctcagaaactgctttgtgatatgtgcattcgactcaccgagttgaaacttttttttgatagagcagttttgaaacactctgtagaatctgaaagtggatatttggagctctttgagggctatggcggaaaagaaaatatattcacattaaactagacagcagcattctcagaaagttctttaggatgtttgcagtaaactcacagagtttaacttacctttccgtagagcagctttgaaacactctgtttgtgggatccacaagtggatatttggaccgctttgagacctttgctggaaatgggaatatcttcacatataaaccagacagaagcattttcagaaacttcttcgtgatgtgtgcattctactcccaaatttgaatcttccttctcatgaagcagttttgaaacactctgtttgtgcaatccacaattggataattggaaagctttgatgcccatggtagaaaaggaaatatcctcatataaaaactagacagaaaggattcacagaaaatgctttgtgatgtgtgcattcaaatcacggagttgaatctttcttttgtcagagcagttttgaaacactgttactgtggaatcttccagcggacacttggagcgctttgagggctatggtggagaaggaaatatcttcacataaaaactagaaagaagcattctcagaaccatttatgtgaagcgtgcgttcaactcacagagttgaaccttccttttgatagaacagttttgaaacactcttttgaacaattgcaggtgaatatttggagggctttgaagcctttgttggaaatgggaatatcttcacacacaaactagccagaaacattctcagaaacttctttgtgatgtgtgcgttgaacccagagagatgaacctttcctttgaaagagcagttttgaaacgtgtttttgtaagatcggcaagcggataattggattcgctttgtgtcctttggtggaaacgcgaatatcttctaataaaaactagacagaaatattctcagaatctcctttgtgatgtgggcattcaactaacacagttgaacatttcttttcacagagcagttttgaaacactcttttggtagaatctgccagtggatatttggagcgcttggagggctactgtgccaatggaaatatcctgcccctgaaaactagacagaagcattctcagaaactgctttgtgatgtttgcattcaactcacagagttgaacatacctcttcatagatcagttttgaaaacctctttttgtagaatctgcaagtggatatttggaccactttgaggccttcatagatacagtaatatcttcacataaaaactagatggaaagcattgtcagaaagttctttgtgatgtgtgaattcaactcacagagttgaaccttcctttaatagagcagttttgaaacactctttttctagaatctgccagtagatatttggagcgctttgaggccttcgttggaaacaggaatatcttcacataaaaagtagatagaggcattctcagaaacttttttgtgatatgtagattcaactcacagcgttgaacctttctttgcatggagcagttttgaaaatcccttttatcgaatctgcaggtagacatttggggtgctttgagggctgtggtgcaaaaggaaatgtcttcccatagaaactagactgcagcattctcagcaacttcttggtgacgtttgcattcatctcacagtgttgaacatacctttccatagagtggttttgaaacactgtttttgtagaatcggcaagtggatatttggactgctttgaggccttcatcggaaacgggaatatcttcacataaacactagagagaagcatcctcagaaacttctttgtcatctgtccattcaactcacagagttgaaccttcctttttctggagcagttttgaaacactctttttggagaatctgcaagtggatatttggagcgctttgaggcctatggtagaaaaagaaatatctgcctctaaaaaccagacagaagcattccgagaaacttctctgtgatgtttgcattcaactagcagagttgaaccttccttttgatagggcagtttggaaacactctttttgtaaaatctgcatgtggatatctggagcggtttgacgcctacggtcaaaaaggaaatatcttcctgggaaaaatagacgaaagcattctcagaaagtgctttgtgatatgtgcattcgactcaccgagttgaaacttttttttgatagagcagttttgaaacactctgtagaatctgaaagtggatatttggagctctttgagggctatggcggaaaagaaaatatattcacattaaagtagacagcagcattctcagagacttctttaggatgtttgcagtaaactcacagagttcaacatacctttccgtaaagcagttttgaaaccctctgtttgtgggatctgcaagtggatatttggaccgctctgagacctttgctggaaatgggaatatcttcacatataaactagacagaaagcattctcagaaacttcttcgtgatgtgtgcattctactcccgaatttgaatcttccttttcatgaagcagttttgaaacactctgtttgtgcaatccacaattggataattggaacgctttgatgcccatggtagaaaaggaaatatcctcatataaaaactagacagaaagattcacagaaaatgctttgtgatgtgtgcattcgaatcacgcagttgaatctttcttttcttagagcagttttgaaacactgtttctgtggaatctgccagcggacacttggagcgctttgagggctatggtggagaaggaaatatcttcccataaaaactagaaagaagcattctcggaaacatttatgtgaagcgtgcattcaactcacagagttgaaccttccttttgatggaacagttttgaaacactcttttgaacaattgcaggtgaatctttggagcgctttgaagcctttgttggaaatgggaatatcttcacacacaaactagccagaagcattctcagaaacttctttgtgatgtgtgcgttgaacccagagagatgaacctttccttggatagagcagttttgaaacgtgtttttgtaagatcggcaagtggataattggcttcgctttgtgtcctttggtggaaacgggaatatcttctaataaaaactagacagaaatattctcagaatcttctttgtgatgtgggcattcaactaacacagttgaacatttcttttcacagagcagttttgaaacactcttttggtggaatctgccagtggatatttggagcgctttgagggctattgtgccaatgcaaatatcttcccctaaaaactagacagaagcattctcagaaactgcttcgggatgtttgcattcaactcacagagttgaacatacctctgcatagagcagttttgaaaacctctttttgtagaatctgcaagtggatattcggaccactttgaggccttcatgggaaacagtagtatcttcacataaaaactagatagaagcattgtcagaaagttctttgtgatgtgtgaattcaactcacagagttgaaccttcctttaatagagcagttttgaaacactctttttgtagaatctgcaagtagatttttggagcgctttgaggccttctttggaaaccggaatatcttcacataaaaagtagatagaggcattctcagaaacttttttgtgatatgtagattcaactcacagcgttgaacctttctttggatggagcagttttgaaaaactcttttattgaatctgcaggtagacatttggggtgctttgagggctgtggtgcaaaaggaaatgtcttcccatagaaactagactgaagcattctcagcaacttctttgtgacgtttgcattcatctcacagtgttgaacatacctttccatagagtagttttgaagcactatttttgtagaatctgcaagtggatatttggactgctttgaggccttcatcggaaacgggaatatcttcacataaacactagacagaagcattctcagaaacttctttgtggtctgtccattcaactcacagagttgaaccttcctttttatggagcagttttgaaacactgtttttggaggatctgcaagtggatatttggagcgctttgaggcccatggtagaaaaagaaatatgtgcctatgacaactagacagaagcattccaagaaacttctctgtgatgtttgcattcaactagcagagttgaaccttccttttgatagggcagtttggaaacactctttttgtagaatctgcatgtggatatctggagcggtttgaggcctacggtcaaaaaggaaatatcttcctgggataaatagacgaaagcattctcagaaactgctttgtgatatgtgcattcgactcaccgagttgaaacttttttttgatagagcagttttgaaacactctgtagaatctgaaagtggatatttggagctctttgagggctatggcggaaaagaaaatatattcacattaaactagagaggagcattcccagaaacttctttaggatgtttgcagtaaactcacagagttgaacatacctttccgtagagcagttttgaaacactctgtttgtggtatccgcaagtggatatttggaccgctttgagacctttgctggaaacgggaataccttcacatataaactagacagaagcattctcagaaacttcttcgtgatgtgtgcattctactcccaaatttgaatcttccttttcatgaagcagttttgaaacactctgtttgtgcaatccacaattggataattggaacgctttgatgcccatggtagaaaaggaaatatcctcatataaaaactagacagaagaattcacagaaaatgctttgtgatgtgtgcattcaaatcacggagttgaatctttcttttgtcagagcagttttgaaacactgtttctgtggaatctgccagcggacacttgcagcgctttgagggctatggtggagaaggaaatatcttcccataagaactagaaagaagcattctcagaaacatttttgtgaagcgtgcattcaactcacagagttgaaccttccttttgatacaacagttttgaaacactcttttgaacaattgcaggtgaatctttggagcgctttgaagcctttgttggaaatgggaatatcttcacacacaaactagccagaagcattctcagaaacttctttgtgatgtgtgcgttgaacccagagagatgaacctttcctttgatagagcagttttgaaacgtgtttttgtaagatctgcaagcggatagttggcttcgctttgtgtcctttggtggaaacgggaatatcttctaataaaaactagacagaaaatattctcagaatcttctttgtgatgtgggcattcagctaacacagttgaacgtttcttttcacagagcagttttgaaacactcttttggtagaatctgccagtggatatttggagcgctttgagggctattgtgccaatggaaaatctgcccctaaaaactagacagaagcattctcagaaactgctttgggatgtttgcattcaactcacagagttgaacatacctctgcatagagcagttttgaaaacctctttttgtagaatctgcaagtggatattcggaccactttgaggccttcataggaaacagtaatatcatcacataaaaactagatagaagcattgtcaggaagttctttgtgatgtgtgaattaaactcacagagttgaaacttcctttaatagagcagtgttgaaacactctttttctagaatctgcaagtagatatttggggcgcttggaggccttcgttgtaaaccggaatatcttcacaggaaatgtagatagaggcattctcagaaacttttttgtgatatgtagattcaactcacagcgttgaacctttctttggatggagcagttttgaaaaactcttttatcgaatctgcaggtagacatttggggtgctttgagggctgtggtgcaaaaggaaatgtcttcccatagaaactagactgaagcattctcagcaacttcttggtgacgtttgcattcatctcacagtgttgaacatacctttccatagagtggtcttgaaacactgtttctgtagaatcggcaagtggatatttggactgctttgaggccttcatcggaaacgggaatatcttcacataaacactagagagaagcattctcagaaacttctttgtgatctgtccgttcaactcacagagttgaaccttcctttttatggagcagttttgaaacactgtttgtggagaatctgcaagtggatatttggagcgccttgaggccaatggtagaaaaagaaatatctgcctctaaatactagactgaagcattccgagaaacttctctgtgatgtttgcattcaactagcagagttgaaacttccttttgatagggcagtttggagacactctttttttagaatctgcatgtggatatctggagcggtttgaggcctacggtcaaaaaggaaatatcttcctgggaaaaatagacgaaagcattctcagaaattgctttgtgatatgtgcattcgactcaccgagttgaaacttttttttgatagagcagttttgaaacactctgtagaatctgaaagtggatatttggagctctttgagggctatggcggaaaagaaaatatattcacattaaagtagacagcagcattcccagaaacttccttaggatgtttgcagtaaactcacagagttgaacacacctttccatagagcagttttgaaacactctgtttgtggaatccgcaagtggatatttggaccgctttgagacctttgctggaaacgggaatatcttcacatataaactggacagaagcattctcagaaacttcttcgagatgtgtgcagtctactcccgaatttgaatcttccttttcatgaagcagttttgaaacactctgtttgtgcaatccacaattggataattggaacgctttgatgcccatggtagaaaaggaaatatcctcatataaaaactagacagaaggattcacagaaaatgctttgtgatgtgtgcattcaaatcacggagttgaatctttcttttgtcagagcagttttgaaacactgtttctgtggaatctgccagcggacacttgcagcgctttgagggctatggtggagaaggaaatatcttcccataagaactagaaagaagcattctcagaaacatttatgtgaagcgtgcattcaactcatagagttgaaccttccttttgatacaacagttttgaaacactctttggaacaattgcaggtgaatctttggagcgctttgaagcctttgttggaaatgggaatatcttcacacacaaactagccagaagcattctcagaaacttctttgtgatgtgtgcgttgaacccagagagatgaacctttcctttgatagagcagttttgaaacgtgtttttgtaagatcggcaagcggataattggcttcgctttgtgtcctttggtggaaacgggcatgtcttctaataaaaactagacagagatattctcagaaacttctttgtgatgtgggcattcacctaacacagttgaacatttcttttcacaaagcagttttgaaacactcctttggtcgaatctgccagtggatatttggagcgctttgagggctattgtgccaatggaaatatctgcccctaaaaactagacagaagcattctcagaaactgctttgtgatgtttgcattcaactcacagagttgaacatacctcttcatagagcagttttgaaaacccctttttgtagaatctgcaagtggatatttggaccactttgaggccttcatagaaaacagtaatatcctcacataaaaactagatggaaacattgtcagaaagttctttgtgatgtgtgaattcaactcacagagttgaaccttcctttaatagagcagttttgaaacactctttttctagaatctgcaagtagatatttggagcgctttgaggccttcgttggaaaccggaatatcttcacaggaaaagtagatagaggcattctcagaaacctttttgtgatatgtagattcaactcacagagttgaacctttctttggatggagcagttttgaaaaacccttttatcgaatctgcaggtagacattcggggtgctttgagggctgtggtgcaaaaggaaatgtcttcccatagaaacttgactgaagccttctcagcaacttctttgtgacgtttgcattcatctcacagtgttgaacatgcctttccctagagtagttttgaaacactatttttgtagaatctgcaagtggacatttggactgctttgaggccttcatcggaaacgggaatatcttcacataaacactagacagaagcattctcagaaacttctttgtgatctgtccattcaactcacagagttgaaccctcctttttatggagcagttttgaaacactgtttttggagaatctgcaagtggatatttggagcgctttgaggcctatggtagaaaaagaaatatctgcccctaaaaactagacagaagcattctgagaaacttctttgtgatgtttacattcacctaccagagttgaaccttccttttgatagggcagtttggaaacactctttttgtagaatctgcatgtggatatctggagcgatttgaggcctactgtccaaaaggaaatatcttcctgggaaagatagacgaaagcattctcagtaaactgctttgtgatatgtgcattcgactcaccgagttgaaacatttttttgatagagcagttttgaaacactctgtagaatctgaaagtggatatttggagctctttgagggctatggcggaaaagaaaatatattcacattaaactagacagccagcattctcagaaacttctttaggatgtttgcagtaaactcacagagttgaacatacctttccgtagagcagttttgaaacactctgtttgtgggatccgcaagtggatatttggaccgctttgagacctttgctggaaatgggaatatctgcacatataaactagacagagcattctcagaaacttcttcgtgatgtgtgcattgtactcccaaatttgcatcttccttctcatggagcagttttgaaacactctgtttgtgcaatctacaattggagaattggaacgcttggatgcctgtggtagaaaaggaaatatcctcatataaaaactagacagaaggattcacagaaaacgctttgtgatgtgtgcattcaaatcacggagttgaatctttcttttgttagagcagttttgaaacactgtttctgtggaatctgccagcggacacttggagcgctttgagggctatggtggagaaggaaatatcttcacataaaaactagaaagaagcattctcagaaacatttatgtgaagcgtgcattcaactcacagagttgaaccttccttttgatacaacagttttgaaacactcttttgaacaattgcaggtgaatctttggagcgctttgaagcctttgttggaaatgggaatatcttcacacacaaactagccggaagcattctcagaaacttctttgtgatgtgtgcgttgaacccagagagatgaacctttcctttgatagagcagttttgaaacgtgtttttgtaagatcggcaagcggataattggcttcgctttgtgtcctttggtggaaacgggaatatcttctaataaaaactagacagaaatattctcagaatctcctttgtgatgtgggcattcaactaacacaattgaacatttcttttcacagagcagttttgaaacacagttttggtagaatctgccagtggatatttggagcgcttggagggctactgtgccaatggaaatatctgcccctgaaaactagacagaagcattctcagaaactgcttcgtgatgtttgcattcaactcacagggttgaacatacctctgcatagagcagttttgaaaacctctttttgtagaatctgcaagtggatattcggaccactttgaggatttcataggaaacagtaatatcttcacataaaaactagatagaagcattgtcagaaagttctttgtgatgtgtgaattcaactcacagagttgaaccttcctttattagagcagttttgaaacactctttttctagaatctgcaagtagatatttggagggctttgaggccttcgttggaaaccggaatatcttcacataaaaagtagatagaggcattctcagaaacttttttgtgatatgtagattcaactcacagtgttgaacctttctttggatggagcagttttgaaaaactcttttatcgaatgtgcaggtagacatttggggtgctttgagggctgtggtgcaaaaggaaatgtcttcccatagaaactagactgaagcattctcagcaacttcttggtgacgtttgcattcatctcacagtgttgaacatacctttccatagagtggttttgaaacactctttttgtagaatcggcaagtggatatttggactgctttcaggccttcatcggaaacgggaatatcttcacataaacaccagagagaagcattctcagaaacttctttgtcatctgtccattcaactcacagagttgaaccttcctttttatggagcagttttgaaacactcattttggagaatctgcaagtggatatttggagcgctttgaggcctatggtagaaaaagaaatatctgcctctaaaaaccagacagaagcattctgagaaacttctttgtgatgtttacattcaactaccagagttgaaccttccttttgatagggcagttcggaaacactccttttgtagaatctgcatgtggatatctggagcgatttgaggcctacggtccaaaaggaaatatcttcctgggaaaaatggacgaaagcattctcagaaagtgctttgtgatatgtgcattcgactcaccgagttgaaacttttttttgatagagcagttttgaaacactctgtagaatctgaaagtggatatttggagctctttgagggctatggcggaaaagaaaatatattcacgttaaaaaagtagacagcagcattctcagaaacttctttaggatgtttgcagtaaactcacagagttgaacatacctttccatagagcagttttgaaacactctgtttgtgggatccgcaaggggatatttggaccgctttgagacctttgctggaaatgggaatatcttcacatataaactagacagaagcattctcagaaacttctttcgtgatgtgtgcattctcctcccgaatttgaatcttccttttcatgaagcagttttgaaacactctgtttgtgcaatccacaattggataattggaacgctttgatgcccatggtagaaaaggaaatatcctcatataaaaactagacagaaggattcacagaaaatgctttgtgatgtgtgcattcaaatcacggagttgaatctttcttttgttagatcagttttgaaacactgtttctgtggaatctgccagcggacacttggagcgctttgagggctacggtggagaaggaaatatcttcacatagaaactagaaagaagcattctcagaaccatttatgtgaagcgtgcattcaactcacagcagttgaaccttccttttgatagaacagttttgaaacactcttttgaacaattgcaggtgaatatttggagggctttgaagcctttgttggaaatgggaatatcttcacacacgaactagccagaagcattctcagaaacttctttgtgatgtgtgcgttgaacccagagagatgaacctttcctttgatagagcagttttgaaacgtgtttttgtaagatctgcaagcggatagttggcttcgctttgtgtcctttggtggaaacgggaatatcttctaataaaaactagacagaaaatattctcacaatctcctttgtgatgtgggcattcaactaacacagttgaacatttcttttcacagagcagttttgaaacactcttttggtagaatctgccagtggatatttggagcgctttgagggctgttgtgccaatggaaatatctgcccctaaaatctagacagaagcattctcagaaactacttcgtgatgtttgcattcaactcacagagttgaacatacctcttcacagagcagttttgaaaacctctttttgtagaatctgcaagtggatattcggagcactttgaggccttcataggaaacagtaatatcttcgcataaaaactagatagaagcattgtcagaaagttctttgtgatgtgtgaattcaactcacagagttgaaccttcctttaatagagcagttttgaaacactctttttctagaatctgccagtagatatttggagcgctttgagtccttcgttggaaaccggaatatcttcacataaaaagtagatagaggcattctcagaaacttttttgtgatatgtagattcaactcacagcgttgaacctttctttggatggagcagttttgaaaaactcttttatcgaatctgcaggtagactttcggggtgctttgagggctgtggtgcaaaaggaaatgtcttcccatagaaactagactgaagcattctcagcaacttcttttgacgtttgcattcatctcacagtgttgaacatacctttccatagagtagttttgaaacactgtttttgtagaatcggcaagtggatatttggactgctttgaggccttcatcggaaacgggaatatcttcacataaacactagagagaagcattctcagaaacttctttgtggtctgtccattcaactcacagagttaaaccttactttttatggagcagttttgaaacactgttttcggacgaactgcaagtggatatttggagcgctttgaggcctatggtagaaaaagaaatatctgcctatgacagctagacagaagcattccgagaaacttctttgtgatgtttgcattcaactagcagagttgaaccttccttttgatagggcagtttggaaacactctttttgtagaatctgcatgtggatatctggagcggtttgaggcctacggtcaaaaaggaaatatcttcctgggaaaaatagacgaaagcattctcagaaactgctttgtgatatgtgcattcgactctccgagttgaaactttctttggatagagcagttttgaaacactctgtagaatctgaaagtggatatttggagctctttgagggctatggcggaaaagaaaagatattcacattaaactagacagcagcattctcagaaacttctttaggatgtttgcagtaaactcacagagttgaacctacctttccgtagagcagttttgaaacactctgtttgtgggatccgcaagtggatatttggaccgctttgagacctttgctggaaatgggaatatcttcacatatagaactagacagaagcattctcagaaacttcttcgtgatgtgtgcattctactcccaaatttgaatcttccttctcattaagcagttttgaaacactctatttgtgcaatctacaattggagaattggaacacttggatgcccgtggttgaaaaggaaatatcctcatataaaaactagacagaaggattcacagaaaatgctttgtgatgtgtgcattcaaatcacggagttgaatctttcttttgttagagcagttttgaaacactgtttctgtggaatctgccagcggacacttggagcgctttgagggctatggtggagaaggaaacatcttcccataaaaactagaaagaagcattctcagaaccatttatgtgaagcgtccattcaactcacagagttgaaccttccttttgatagaacagttttgaaacactcttttgaacaattgcaggtgaatatttggagggctttgaagcctttgttggaaatgggaatatcttcacacacaaactagccagaagcattctcagaaacttctttgtgatgtgtgcgttgaacccagagagatgaacctttcctttgatagagcagttttgaaacgtgtttttgtaaggtctgcaagcggataatgggcttcgctttgtgtcctttggtggaaacgggaacatcttctaattaaaactagacagaaatattctcagaatctcctttgtgatgtgggcattcaactaacacaattgaacatttcttttcacagagcagttttgaaacacagttttggtagaatctgccagtggatatttggagcgcttggagggctattttgccaatggaaatatctgcccctgaaaactagacagaagcattctcagaaactacttcgtgatgtttgcattcaacacacagagttgaacatacctcttcacagagcagttttgaaaacctctttctgtagaatctgcaagtggatattcggaccactttgaggccttcataggaaacagaaatatcttcacataaaaactagatagaagcattgacagaaagttctttgtgatgtgtgaattcaactcacagagttgaaccttcctttaatagagcagttttgaaacactctttttctagaatctgcaagtagatatttggagcgctttgaggccttcgttggaaaccggaatatcttcacaggaaaagtagatagaggcattctcagaaacttttttgtgatatgtagattcaactcacaagcgttgaacctttctttggatggagcagttttgaaaaactcttttatcgaatctgcaggtagacatttggggagctttgagggctgtggtgcaaaaggaaatgtcttcccatagaaactagactgaagcattctcagcaacttcttggtgacgtttgcattcatctcacagtgttgaacatacctttccatagagtagttttgaaacactgtttttgtagaatcggcaagtggatatttggactgctttgaggccttcatcggaaacgggaatatcttcacataaacactagagagaagcattctcagaaacttctttgtgatctgtccattcaacccacagagttgaaccttcctttttatggagcagttttgaaacactccttttgaagaatctgcaagtggatatttggagcgctttgaggcctatggtagaaaaagaaatatctgcctctaaaaaccagacagaagaattctgagaaacttctttgtgatgtttgcattcaactaccagaggtgaaccttccttttgatagggcagtttggaaacactctttttgtagaatctgcatgtggatatctggagcgatttgaggcctacggtccaaaaggaaatatcttcctgggaaaaatagacgaaagcattctcagaaactgctttgtgatatgtgcattcgactcaccgagttgaaactttttttggatagagcagttttgaaacactctgtagaatctgaaagtggatatttggagctctttgagggctatggcggaaaagaaaatatattcacaataaaccagacagcagcactctcagaaacttctttaggatgtttacagtaaactcacagagttgaacatacctttccgtagagcagttttgaaacactctgtttgtgggatccgcaagtggatatttggacctctttgagacctttgctggaaatgggaatatcttcacatataaactagacagaaagcattctcagaaacttcttcgtgatgtgtgcattctcctcgcaaatttgaatcttccttttcatgaagcagttttgaaacactctgtttgtgcaatccacaattggataattggaacgctttgatgcccatggtagaaaaggaaatatcctcatataaaaactagacagaaggattcacagaaaatgctttgtgatgtgtgcattcaaatcacggagttgaatctttcttttgtcagagcagttttgaaacactgtttctgtggaatctgccagcggacacttggaacgctttgagggctacggtggagaaggaaatatcttcccataaaaactagaaagaagcattctcagaaacatttatgtgaagcgtgcattcaactcacagagttgaaccttccttttgatacaacagttttgaaacactcttttgaacaattgcaggtgaatctttggagcgctttgaagcctttgttggaaatgggaatatcttcacacacaaactagccagaagcattctcagaaacttctttgtgatgtgtgcgttgaacccagagagatgaacctttccttcgatagagcagttttgaatcgcgtttttgtaagatcggcaagcggataattggcttcgctttgtgtcctttggtggaaacgggaatatcttctaataaaaactagacagaaatattctcagaatctcctttgtgatgtgggcattcaactaacacagttgaacatttcttttcacagagcagttttgaaacactcttttggtcgaatatgccagtggatatttggagcgcttggagggctattgtgccaatggaaatatctgcccctgaaaactagacagaagcattctcagaaactgctttgtgatgtttgcattcaactcacagagttgaacataccttttcatagagcagttttgaaaacctctttttgtagaatctgcaagaggatattcggaccactttgaggccttcataggaaacagtaatatcttcacataaaaactagatagaagcattgtcagaaagttctttgtgatgtgtgaattccactcacagagttgaaccttcctttaatagagcagttttgaaacactctttttctagaatctgcaagtagatatttggagcgctttgaggccttctttggaaaccggaatatcttcacataaaaagtagatagaggcattctcagaaactttttcgtgatatgtggattcaactcacagcgttgaacctttcttttgatagagcagttttggaaaactcttttatcgaatctgcaagtagacatttggagtgctttgagggctgtggtgcaaaaggaaatgtcttcccatagaaactagactgaagcattctcagcaacttctttgtgacgtttgcattcatctcacagtgttgaacatacctttccatagagtagttttgaaacactatttttgtagaatctgcaagtggatatttggactgctttgaggccttcatcggaaacgggaatatcttcacataaacactagacggaagcattctcagaaacttctttgtgatctgtccattcaactcacaggagttgaaccttcctttttatggagcagttttgaatcactgtttttggagaatctgcaagtggatatttggagcgctttgaggcctatggtagaaaaagaaatatctgcctctaaaaaccagacagaagcattctgagaaacttctttgtgatgtttgcattcaactaccagagttgaaccttccttttgatagggcagtttggaaacactctttttgtagaatctgcatgtggatatctggagcgatttgaggcctacggtcaaaaaggaaatatcttcctgggaaaaatagacgaaagcattctcagaaagtgctttgtgatatgtgcattcgactcaccgagttgaaacttttttttgatagagcagttttgaaacactctgtagaatctgaaagtggatatttggagctccttgagggctatggcggaaaagaaaatatattcacattaaagtagacagcagcattctcagaaacttctttaggatgtttgcagtaaactcgcagagtttaacatacctttccgtagagcagttttgaaacactctgtttgtgggatccgcaagtggatatttggaccgctttgagacctttgctggaaatgggaatatcttgacgtataaactagacagaagcattctcagaaacttcttcgtgatgtgtgcattgtactcccaaatttgaatcttccttctcatggagcagttttgaaacactctgtttgtgcaatctacaattggagaattggaacgcttggatgcccgtggtagaaaaggaaatatcctcatataaaaactagacagaaaggattcacagaaaatgctttgtgatgtgtgcattcaaatcacggagttgaatttttcttttgttagagcagttttgaaacactgtttctgtggaatctgccagcggacacttggagcgctttgagggctatggtggagaaggaaatatcttcacataaaaactagaaagaagcattctcagaaccatttatgtgaagcgtgcgttcaactcacagagttgaaccttccttttgatagaacagttttgaaacactcttttgaacaattgcaggtgaacatttggagggctttgaagcctttgttggaaatgggaatatcttcacacacaaactagccagaagcattctcagaaatttctttgtgatgtgtgcgttgaacccagagagatgaacctttcctttgatagagcagttttgaaacgtgtttttgtaagatctgcaagcggatagttggcttcgctgtgtgtcctttggtggaaacgggaatatcttctaataaaaactagacagaaatattctcagaatcttctttgtgatgcgggcattcacctaacacagttgaacgtttcttttcacagagcagttttgaaacactcttttggtagaatctgccagtggatatttggagcgctttaagggctattgtgccaatggaaatatctgcccctaaaaactagacagaagcattctcagaaactacttcgtgatgtttgcattcaacacacagagttgaacatacctcttcacagagcagttttgaaaacctctttctgtagaatctgcaagtggatattcggaccactttgaggccttcataggaaacagtaatatcttcgcataaaaactagatagaagcattgtcagaaagtactttgtgatgtgtgaattcaactcacagagttgaaccttcctttaatagagcagttttgaaacactctttttctagaatctgcaagtagatatttggagcgctttgaggccttcgttggaatccggaatatcttcacataaaacgtagatagaggcatgctcagaaacttttttgtcatatgtagattcaactcacagcgttgaacctttcttttgatagagcagttttgaaaaactcttttatcgaatctgcaagtagacatttggagtgctttgagggctctggtgcaaaaggaaatgtcttcccatagaaactagactgaatcattctcagcaacttcttggtgacgattgcattcatctcacagtgttgaacatacctttgcatagagtagtttcgaaacactatttttgtagaatctgcaagtggacatttggactgctttgaggccttcatcggaaacgggaatatcttcacataaacactagacagaagcattctcagaaacttctttgtgatctgtccattcacctcacagagctgaactttcctttttatggagcagttttgaaaaactgtttttggagaatctgcaagtggatatttggagcgctttgaggcttatggtagaaaaaaaatatctgcccctaaaaaccagacagaagcattctgagaaacttctttgtgatgtttgccttcaactaccagagttgaaccttccttttgatagggcagtttggaaacactctttttgtagaatctgcatgtggatatctggagcgatttgaggcctacggtccaaaaggaaatatcttcctgggaaagatagacgaaagcattctcagaaactgctttgtgatatgtgcattcgactcaccgagttgaaacttttttttgatagagcagttttgaaacactctgtagaatctgaaagtggatgtttggagctctttgagggctatggcggaaaagaaaatatattcacattaaactagacagcagcattctcagaaacttctttaggatgtttgcagtaaactcacagagttgaacatacctttccgtagagcagttttgaaacactttgtttgtgggttccgcaagtggatatttggaccgctttgagacctttgctggaaatgggaatatcttcacgtataaactagacagaagcattctcagaaacttcttcctgatgtgtgcattctcctcccgaatttgaatcttccttttcatgaagcagttttgaaacactctgtttgtgcaatccacaattggataattggaacgctttgatgcccatggtagaaaaggaaatatcttcatataaaaactagacagaaggattcacagaaaatgctttgtgatgtgtgcattgaaatcacggagttgaatctttcttttgttagagcagttttgaaacactgtttctgtggaatctgccagcggacacttggagcgctttgagggctatggtggagaaggaaatatcttcacataaaaactagaaagaagcattctcagaaacatttatgtgaagcgtgcattcaactcacagagttgaaccttccttttgatacaacagttttgaaacacccttttgaacaattgcgggtgaatctttggagcgctttgaagcctttgttggaaatgggaatatcttcacacacaaactagccagaagcattctcagaaacttctttgtgatgtgtgcgttgaacccagagagatgaacctttcctttgatagagcagttttgaaacgtgtttttgtaagatcggcaagcagataactggcttagctttgtgtcctttggtggaaacgggaatatcttctaataaaaactagacagaaatattctcagaatctcctttgtgatgtgggcattcaacaaacacaattgaacatttcttttcacagagcagttttgaaacacagttttggtagaatctgccagtggatatttggagcgcttggagggctattgtgccaatggaaatatctgcccctgaaaactagacagaggaattctcagaaactactttgtgatgtttgcattcaactcacagagttgaacatacctcttcatagagcagttttgaaaacctctttttgtagaatctgcaagtggatattcggaccactttgaggccttcataggaaacagtaataccttcacataaaaattagatagaagcattgtcagaaagttctttgtgatgtgtgaattcaactcacagagttgaaccttcctttaatagagcagttttgaaacactttttttctggaatctgcaagtagatatttggagcgctttgaggccttcgttggaaaccggagtatcttcacaggaaaagtagataggggcattctcagaaacttttttgtgatatgtagattcaactcacagcgttgaacctttctttggatggagcagttttgaaaaactcttttatcgaatctgcaggtagacatttggggtgcttttagggctgtggtgcaaaaggaaatgtcttcccatagaaactagactgaagcattctcagcaacttctttgtgacgtttgcattcatctcacagtgttgaacatacctttccatagagtagttttgaagcactatttgtgtagaatctgcaagtggatatttggactgctttgaggccttcatcggaaacgggaatatcttcacataaacactagacagaagcattctcagaaacttctttgtcatctgtccattcaactcatagagttgaaccttcctttttatggagcagttttgaaacactccttttggagaatctgcaagtggatatttggagcgctttgaggccaatggtagaaaaagaaatatctgcctctaaaaaccagacagaagcattctgagaaacttctttgtgatgtttgccttcaactaccagagttgaaccttccttttgataaggcagtttggaaacactctttttgtagaatctgcatgtggatatctggagcgatttgaggcctacggtccaaaaggaaatatcttcctgggaaagatagacgaaagcattctcagaaactgctttgtgatatgtgcattcgactcaccgagttgaaactttttttggatagagcagttttgaaacactctgtagaatctgaaagtggatatttggagctctttgagggctatggcagaaaagaaaagatattcacattaaactagacagcagcattctcagaaacttctttaggatgtttgcagtaaactcacagagttgaacatacctttccgtagagcagttttgaaacactctgtttgtgggatccgcaagtggatatttggaccgctttgagacctttgctggaaatgggaatatcttcacatataaactagacagaagcattctcagaaacttcttcgtgatgtgtgcattctactcccgaatttgaatcttccttttcatgaagcagttttgaaacactctgtttgtgcaatccacaattggataattggaacgctttgatgcccatggtagaaaaggaaatatcctcatataaaaaccagacagaaggattcacagaaaatgctttgtgatgtgtgcattcaaatcacggagttgaatctttcttttgttagagcagttttgaaacacggtttctgtggaatctgccagcggacacttggagcgctttgagggctatggtggagaaggaaatatcttcccataaaaactagaaagaagcattctcagaaacatttatgtgaagccgtgcattcaactcacagagttgaaccttccttttgatagaacagttttgaaacactcttttgaacaattgcaggtgaatctttggagcgctttgaagcctttgttggaattgggaatatcttcacacacaaactagccagaagcattctcagaaacttctttgtgatgtgtgcgttgaacccagacagatgaacctttcctttgattagagcagttttgaaacgtgtttttgtaagatctgcaagcggataattggcttcgctttgtgtcctttggtggaaacgggaatatcttctaataaaaagtagacagaaatattctcagaatctcctttgtgatgtgggcattcaactaacacagttgaacatttcttttcacagagcagttttgaaacactcttttggtagaatctgccagtggatatttggagcgcttggagggctattgtgccaatggaaatatctgcccctgaaaactagacagaagcattctcagaaactacattgtgatgtttgcattcgactcacagagttgaacatacctcttcatagagcagttttgaaaaccttttttgtagaatctgcaagtggatattcggaccactttgaggccttcataggaaacagtaatatcttcacataaaaactagatagaagcattgtcaggaagttctttgtgatgtgtgaattcaactcacagagttgaaccttcctttaatagagcagttttgaaacactctttttctagaatctgcaagtagatatttggagcgcttggaggacttcgttggaaaccggaatatcttcacaggaaatgtagatagaggcattctcagaaactttttcgtgatatgtggattcaactcacagcgttgaacctttcttttgatagggcagttttgtaaaactcttttatcgaatctgtaagtagacatttggagtgctttgagggctgtggtgcaaaaggaaatgtcttcccatagaaactagactgaatcattctcagcaacttcttggtgacgtttgcattcatctcacagtgttgaacatacctttgcatagagtagtttcgaaacactatttttgtagaatctgcaagtggacatttggactgctttgaggccttcatcggaaacgggaatatcttcaacataaacactagacagaagcattctcagaaacttctttgtgatctgtccattcaactcacagagttgaaccttcctttttctggagcagttttgaaacactctttttggagaatctgcaagtggatatttggagcgctttgaggcctatggtagaaaaagaaatatctgcccctaaacaccagacagaagcattctgagaaacttctttgtgatgtttgcattcaactaccagagttgaaccttccttttgatagggcagtttggaaacactctttttgtagaatctgcatgtggatatctggagcgatttgaggcctacggtcaaaaagggaaatatcttcctgggaaaaatagacgaaagcattctcagaaactgctttgttatatatgcattcgactctccgagttgaaacttttttttgatagagcagttttgaaacactctgtagaatctgaaagtggatatttggagcactttgagggctatggcggaaaagaaattatattcacatgaatctagacagcagcattctcagagacttctttaggatgtttgcagtaaactcacagagttgaacatacctttccgtaaagcagttttgaaaccctctgtttgtgggatctgcaagtggatatttggaccgctttgagacctttgctggaaatgggaatatcttcacatataaactagacagaagcattctcagaaacttcttcgtgatgtgtgcattctcctcccgaatttgaatcttccttttcatgaagcagttttgaaacactctgtttgtgcagtccacaattggataattggaacgctttgatgcccatggtagaaaaggaaatatcctcatataaaaactagacataaggattcacagaaaatgctttgtgatgtgtgcattcaaatcacagagttgaatctttcttttgtcagagcagttttgaaacactgttactgtggaatctgccagcggacacttggagcgctttgagggctatggtggagaaggaaatatcttcccataaaaactagaaagaagcattctcagaaacatttatgtgaagcgtgcattcaactcacagagttgaaccttccttttgatacaacagttttgaaacactctttggaacaattgcaggtgaatctttggagcgctttgaagcctttgttggaaatgggaatatcttcacacacaaactagccagaagcattctcagaaacttctttgtgatgtgtgcgttgaacccagagagatgaacctttcctttgatagagcagttttgaaacgtgtttttgtaagatctgcaagcggatagttggcttcgctttgtgtacctttggtggaaacgggaatatcttctaataaaaactagacagaaatattctcagaatcttctttgtgttgtgggcattcaactaacacagttgtacgtttcttttcacagagcagttttgaaacactcttttggtagaatctgccagtggatatttggagcgctttgagggctattgtgccaatggaaatatcttcccctaaaaactagacagaagcattctcagaaactacttcgtgatgtctgcattcaacacacagagttgaacatacctcttcacagagcagttttgaaaacctctttctgtagaatctgcaagtggatattcggaccactttgaggccttcgtaggaaacagtaatatcttcacataaaaactagatagaagcattgtcagaaagttctttgtgatgtgtgaattcaactcacagagttgaaccttcctttaatagagcagttttgaaacactctttttctagaatctgcaagtagatatttggagcgctttgaggccttcgttggaaaccggaatatcttcacaggaaaagtagatagaggcattctcagaaacttttttgtgatatgtagattcaactcacagcgttgaacctttcttttgatagagcagttttgaaaaactcttttatcgaatctgcatgtagacatttggagtgctttgagggctgtggtgcaaaaggaaatgtcttcccatagaaactagactgaagcattctcagcaacttctttatgacgtttgcattcatctcacagtgttgaacatacctttccatagagtagttttgaaacactatttttatagaatctgcaagtggatatttggactgctctgaggccttcatcggaaacgggaatatcttcacataaacactagacagaagcattctcaggaaacttctttgtgatctgtccattcaactcacagagttgaaccttcctttttatggagcagttttgaatcactgtttttggagaatctgcaagtggatatttggagcgctttgaggcctatggtagaaaaagaaatatctgcttctaaaaaccagacagaagcattctgagaaacttctctgtgatgtttgcattcaactagcagagttgaaccttccttttgatagggcagtttggaaacactctttttgtagaatctgcatgtggatatctggagccgtttgaggcctacggtcaaaaaggaaatatcttcctgggaaaaatagacgaaagcattctcagaaactgctttgtgatatgtgcattcgactgaccgagttgaaacttttttttgatagagcagttttgaaacactctgtagaatctgaaagtggatatttggagctctttgagggctatggcggaaatgaaactatattcacattaaagtagacagcagcattctcagaaacttctttaggatgtttgcagtaaactcacagagttgaacctacctttccgtagagcagttttgaaacactctgtttgtgggatatgcaagtggatatttggacagctttgagaactttgctggaaatgggaatatcttcacatataaactagacagaagcattctcagaaacttcctcgtgatgtgtgcattctactcccgaatttgaatcttccttttcatgaagcaattttgaaacactctgtttgtgcgatccacaattggataattggaacgctttgatgcccatggtagaaaaggaaatatcctcatatgaaaactagacagaaggattcacagaaaatgctttgtgatgtgtgcattcaaatcacggagttgaatctttcttttgtcagagcagttttgaaacactgtttctgtggaatctgccagcggacacttggagcgctttgagggctgtggtggagaaggaaatatcttcccataaaaactagaaagaagtattctcagaaacatttatgtgaagcgtgcattcaactcacagagttgaaccttacttttgatacaacagttttgaaacactcttttgaacaattgcaggtgaatctttggagcgctttgaagcctttggtggaaatgggaatatcttcacacacaaactagccagaagcattctcagaaacttctttgtgatgtgtgcgttgaacccagagagatgaacctttcctttgatagagcagttttgaaacgtgtttttgtaagatctgcaagcggataattggcttcgctttgtgtcctttgttggaaacgggaatatcttccaataaaaactagacagaaatattctcagaatctcctttgtgatgtgggcattcaactaacacagttgaacatttcttttcacagagcagttttgaaacactcttttggtagaatctgccagtggatatttggagcgcttggagggctattgtgccaatggaaagatctgcccctgaaaactagacagaagcattctcagaaactacttcgtgatgtctgcattcaacacacagagttgaacatacctcttcacagagcagttttgaaaacctctttctgtagaatctgcaagtggatattcggaccactttgaggccttcataggaaagagtaatatcttcacataaaaactagatagaagcattgtcagaaaattctttgtgatgtgtgaattcaactcacagagttgaaccttccttcaatagagcagttgtgaaacactctttttctagaatctgcaagtagatatttggagcgctttgaggccttcgttggaatccggaatatcttcacaggaaaagtagatagaggcattttcagaaacttttttgtgatatgtagattcaactcacagcgttgaacctttctttggatggagcagttttgaaaaacccttttatcgaatctgcaggtagacatttggggtgctttgagggctgtggtgcaaaaggtaatgtcttcccatagaaactagactgaagcattctcagcaacttctttgtgacgtttgcattcatctcacagtgttgaacatacctttgcatagagtagttttgaaacactatttttgtagaatctgcaagtggatatttggactgctttgaggccttcatcggaaacgggaatatcttcacataaacactggacagaagcaatctcagaaacttctttgtgatctgtccattcaactcacagagttgaaccttcctttttatggagcagttttgaaacactgttcttggagaatctgcaagtggatatttggagcgctttgaggcctgtggtagaaaaagaaatatctgcctctaaaaactagacagaagcattctgagaaacttctttgtgatgtttgcattcaactatcagagttgaaccttccttttgatagggcagtttggaaacactctttttgtagaatctgcatgtggatatctggagcggtttgaggcctacggtcaaaaaggaaatatcttcctgggaaaaatagacgaaagcattctcagaaactgctttgtgatatgtgcattcgactctccgagttgaaactttttttggataaagcagttttgaaacactctgtagaatctgaaagtggatatttggagctctttgagggctatggcggaaaagaaaagatattcacattaaactagacagcagcattcccagaaacttctttaggatgtttgcagtaaactcacagagttgaacatacctttccgtagagcagctttgaaacactctgtgtgtgggatccgcaagtggatatttggaccgctttgagacctttgctggaaacgggaatatcttcacatataaactggacagaagcattctcagaaacttcttcgtgacgtgtgcattgtactcccaaatttgaatcttgcttctcatggagtagttttgaaacactctgtttgtgcaatctacaattggagaattggaaggcttggttgcccgtggtagaaaaggaaatatcctcatataaaaactggacagaaggattcacagaaaatgctttgtgatgtgtgcattcaaatcacggagttgaatctttcttttgttagagcagttttgaaacacggtttctgtggaatctgccagaggacacttggagcgctttgagggctatggtggagaaggaaatatcttcccataaaaactggaaagaagcattctcagaaacatttatgtgaagcgtgcattcaactcacagagttgaaccttcctttggatacaacagttttgaaacactcttttgaacaattgcaggtgaatctttggagcgctttgaagcctttgttggaaatgggaatatcttcacacacaaactagccagaagcattctcagaaacttctttgtgatgtgtgcgttgaacccagagagatgaacctttcctttgatagagcagttttgaaacgtgtttttgtaagatcggcaagcggatatttggcttcgctttgtgtcctttggtggaaacgggaatatcttctaataaaaactagacagagatattctcagaaacttctttgtgatgtgggtattcaactaacacagtcgaacatttcttttcacagagcagttttgaaacactcttttggtcgaatctgccagtggatatttggagcgctttgagggctattgtgccaatggaaatatctgcccctaaaaactagacagaagcattctcagaaactacttcgtgatgtttgcattcaacacacagagttgaacatacctcttcacagagcagttttgaaaacctctttctgtagaatctgcaagtggatattcggaccactttgaggccttcataggaaacagtaatatcttcacataaaaactagatagaagcattgtcagaaagttctttgtgatgtgtgaattcaactcacagagttgaaccttcctttaatagagcagttttgaaacactctttttctagaatctgccagtagatatttggagcgctttgaggccttctttggaaaccggaatatcttcacataaaaagtagatagaggcattctcagaaacttttttgtgatatgtagattcaactcacagcgttgaacctttctttggatggagcagtttagaaaaactcttttattgaatctgcaggtagacatttggggtgctttgagggctgtggtgcaaaaggaaatgtcttcccatagaaactagactgaagcattctcagcaacttctttgtgacgtttgcattcatctcacagtgttgaacatacctttccatagagtagttttgaaacactgtttgtgtagaatcggcaagtggatatttggactgctttgaggccttcatcggaaacgggaatatcttcacataaacactagagagaagcattctcagaaacttctttgtgatctgtccattcaactcacagagatgaccttcctttttatggagcagttttgaatcactgtttttggagaatctgcaagtggatatttggagcgctttgaggcctatggtagaaaaagaaatatctgcctctaaaaaccagacagaagcattccgagaaacttctctgtgatgtttgcattcaagtagcagagttgaaccttccttttgatagggtagtttggaaacactctttttgtagaatctgcatgtggatatctggagcggtttgaggcctacggtcaaaaaggaaatatcttcctgggaaaaatagacgaaaacattctcagaaactgctttgtgatatgtgcattcgactcaccgagttgaaactttttttggatagagcagttttgaaacactctgtagaatctgaaagtggatatttggagctctttgagggctatggcggaaaagaaaatatattcacattaaactagacagcagcattctcagaaacttctttaggatgtttgcagtaaactcacagagttgaacatacctttccgtagagcagttttgaaacactctgtttgtgggatccgcaaggggatatttggaccgctttgagacctttgctggaaatgggaatatcttcacatataaactagacagaaacattctcagaaacttcttcgtgatgtgtgcattctcctcccgaatttgaatcttccttttcatgaagcagttttgaaacactctgtttgtgcaatccacaattggataattggaacgctttgatgcccatggtagaaaaggaaatatcctcatataaaaactagacagaaggattgacagaaaatgctttgtgatgtgtgcattcaaatcacggagttgaatctttcttttgttagagcagttttgaaacactgtttctgtggaatctgccagcggacacttggagcgctttgagggctgtggtggagaaggaaatatcttcccaaaaaaactagaaagaagcattctcagaaacatttatatgaagcgtgcattcaactcacagagttgaaccttccttttgatacaacagttttgaaacactcttttgaacaattgcaggtgaatctttggagcgctttgaagcctttgttggaaatgggaatatcttcacacacaaactagccagaaatattctcagaatcttctttgtgatgtgggcattcaactaacacagttgaacatttcttttcacagagcagttttgaaacactcttttggtagaatctgccagtggatatttggagcgctttgagggctattgtgccaatgcaaatatctgcccctaaaaactagacagannnnnnnnnnnnnnnnnnnnnnnnnnnnnnnnnnnnnnnnnnnnnnnnnnnnnnnnnnnnnnnnnnnnnnnnnnnnnnnnnnnnnnnnnnnnnnnnnnnnctctgtttgtaaagtcggcaagtggatattcagacctctttgaggccttcgttggaaacgggatttcttcatattctgctagacagaagaattctcagtaacttccttgtgttgtgtgtattcaactcacagagttgaacgatcctttacacagagcagacttgaaacacactttttgtggaatttgcaagtggagatttcagcctctttgaggtcaatggtagaataagaaatatcttcctatagaaactagacagaatgattctcagaaactcctttgtgatgtgtgcgttcaactcacagagtttaacctttcttttcatagagcagttaggaaacactctgtttgtaaagtctgcaagtggatattcagacctccttgaggccttcgttggaaacgggatttcttcatattctgctagacagaagaattctcagaaacttccttgtgttgtgtgttttcaactcacagagttgaacgatcctttacacagagcagacttgaaacactctttttgtggaatttgaaagtggagatttcagccgatttgtggtcaatggtagaaaacgaaatatcttcgtacaaaaacaagacagaatgattctcagaaactcctttgtgatgtgtgcgttcaactcacagagtttaacctttcttttcatagaatagttaggaaacactctgtttgtaaagtctgcaagtggatattcagatctccttgaggccttcgttggaaacgggatttcttcatattctgctagagagaagaattctcagtaacttccttgtgttgtgtgtattcaactcacagagttcaaccatcctttacacagagcagacttgaaacactcttcttgtggaatttgcaagtggagatttcagccgctttgaggtcaatggtagaaaaggaaatatcttcgtataaatctagacagaatcattctcagaaactgctctgtgatgtgtgcgttcaactctcagagtttaacttttcttttcattcagcagtttggaaacactctgtttgtaaagtctacacgtggatattttgaccacttagagaccttcgttggaaacgggtttttttcatgtaaggctagacagaagaattcccagtaacttccttgtgttgtgtgcattcaactcacagagatgaacgttcccttagacagagcagatttgaaacactctatttgtgcaatgtgcaagtgtagatttcaagcgctttaaggtcaatggcagaaaagaaaatatcttcttttcaaaactagacagaatcattcccacaaactgcgttgtgatgttttcgttcaactcacagggtttaacctttcttttcatagagcagttaggaaacactctgtttgtaaagtctctaagtggatatactgacatcttgttgccttctttggaaacgggatttcttcatattctgctatacagaagaattctcagaaacttccttgtgttgtgtgttttcaactcacagagttgaacgatgcttcacacagagtagacttgaaacactctttttgtggaatttgcaagtggagatttcagccgctttgaggtcaatggtagaataggatatatgttcctatagaaaattgacagaatgattgtcagaaactccttggtgctgtgtgcgttcaactcacagagtttaacctttcttttcatagagcagttaggaaacactctgtttgtaaagtctgcaagtggatattcagacctctttgaggccttcgttggaaacgggatttcttcatattctgctagagagaagaattctcagtaacttccttctgttgtgtgtattcaactcacagagttcaacgatcctttacacagagcagacttgaaacactctttttgtggaatttgcaagtggacatttcagccgctttgaggtcaatggtagaaaaggatatatcttcgtataaaaactagacagaattattctcagaaactcctttgtgatgtgtgcgttcaactcacagagtttaacctttcttttcgtagagcagttaggaaacactctgtttgtaaagtcggcaagtggatattcagacctctttggggccatcgttggaaatgggatttcttcatattctgctagacagaagaattctcagtaacttccttgtgttgtgtgtattcaactgacagagttgaacgatcctttacacagagcagacttgaaacacactttttgtggattttgcaagtggagatttcagcctctttgagatcaatggtagaataggaaatatcttcctatagaaactagacagaatgattctcagaaactcctttgtgatgtgtgcgttcaacacacagagtttaacctttcttttcgtagagcagttaggaaacactctgtttgtaaagtcggcaagtggatattcagacctctttgaggccatcgttggaaatgggatttcttcatattctgctagacagaagaattctcagtaacttccttgtgttgtgtgtattcaactgacagagttgaacgatcctttacacagagcagacttgaaacactctttttgtggaatttgcaagtggagatttcagccgctttgaggtcaatggtagaaaaggaaatatctgcgtataaaaactagacagaatgattctcagaaactcctttgtgatgtgtgcgttcaactcacagagtttaacctttcttttcatagagcagttaggaaacactctgtttgtaaactctgcaagtggatattcagacatcttagaggctttcgttggaaacgggaattcttcatattctgctatacagaagaattcttagaaacttccttgtgttgtgtgttttcaactcacagagttgaacgatgctttacacagagtagacttgaaacactctttttgtggaatttgcaagtggagatttcagccgctttgaggtcaatggtagaaaaggaaatatcttcgtataaaaactagacagaatgattctcagaaactcctttgtgatgtgtgcgttaaactcacagagtttaacctttcttttcatagaacagttaggaaacactctgtttgtaaagtctgcaagtggatattcagacctctttgaggccttcgttggaaacgggatttcttcatattctgctagagagaagaattctcagtaacttctttctgttgtgtgtattcaactcacagagttcaacgatcctttacacagagcagacttgaaacagtctttttgtggaatttgcaattggagatttcagccgcattgaggtcaatggtagaaaaggaaatatcttcgtataaaaactagacagaatgattctcagaaactcctttgtgatgtgtgcgttcaactcacagagtttaacctttcttttcttagagcagttaggaaacactctgtttgtaaagtctgcaagtggatattcagacctccttgaggccttcgttggaaacgggatttcttcatattatgccagacagaagaattctcagtaacttccttgtgttgtgtgtattcaactcacagagttcaacgatcctttacacagagcagacttgaaacactcttcttgtggaatttgcaagttgagatttcagccgctttgaggtcaatggtagaatagggaatatcatcctatagaaactagacagaatgattctcagaatctcctttgtgatgtgtgcgttcaactcacagagtttaacctttcttttcgtagagcagttaggaaacactctgtttgtaaagtcggcaagtggatattcagacctcccttgaggccttcgttggaaacgggatttctacattttatgctagacagaagaattctcagtaactaccttgtgttgtgtgtattcaactcacagagttgaacgatcctttacagagagcagacttgaaacactctttttgtggaatttgcaagtggagatttcagccgctttgaggtcaatggtagaataggaaatatcttcctatagaaactagacagaatgattctcagaaactcctttgtgatgtgtgcgttcaactcacagagtttaacctttcttttcaaaaagcagttaggaaacactctgtttgtaaagtctgcaagtggatattcagacatctttgaggctttccctggaaatgggatttcttcatattctgatatacagaagaattctcagaaatttccttgtgttgtgtgttttcaactcacagagttgaacgatgctttacacagagtagacttgaaacactctttttgtggaatttgcaagtggagatttcagccgctttgaggtcaatggtagaaaaggaaatatcttcgtataaaaactagacagaatgattctcagaaactcctttgtgatgtgtgcgttcaactcacagagtttaaccttcttttcatagagcagttaggaaacactctgtttgtaaagtcnnnnnnnnnnnnnnnnnnnnnnnnnnnnnnnnnnnnnnnnnnnnnnnnnnnnnnnnnnnnnnnnnnnnnnnnnnnnnnnnnnnnnnnnnnnnnnnnnnnnttgtcatgtgtgcgttcaacacacagaatttaatcaattaggacctcttgaggcatttgttggaaaacggattcttcgtaaaatgctagactgaagaattctcaggaaattctttgtgttgtgtgtattcaactcacagagtagaaccttcctttaaacagagcagatttgaaacactctttttgtggaattttcaagtggagatttcaaacgcttgaggccaatggtagaaaaggaaatatcttcgtataaaaattagacagaatcattctcaacaactgctttgtgatgtgtgtgttcaacacagagagtttaaccaattaggacctctttgaggcatttgttggaaaatggatttcgtcgtaaaatgctggacagaagaattctcaggaacttctttgtgttgtgtgtattcaactcacagagtagaaccttcctttagacagagaagatttgaaacactctttttgtggaatttgcaactgcagatttcaagcgctttgaggccaatggtagaaaaggaaatatctttgtatacaaacaagacagaatcattctcagaaaatgctttgtgttgtgtgcattcaacacacagagtttaacctttcttttcatagagcagtttggaaacactctgtttgtaaagtctggaagtggatatttggacctctttgaggccttcattggaaacgggatttcttcatataatgctacacagaagaattctcagtaacttctttgtgttgtgggtattcacctcacagaattgaaacttcctttagacagagcaaatttcatacacactttttgtgtaatttgcaacgggagatttcaagcgctttaatgtcaatggtagaaaaagaaataacttcgtgtaaaaactagagagaatcatttccagaaagtgctttgtgatgtgtgcgttaaactcacagagtttaacctttcttttcatagagcagttgggaaacactcggtttgaaagtctgccaaaggatatttggacctccttgaggccttcgttggaaacgtgatttcatcatataatgctagaaagaagaattctcagtaacttatttgtgttgtgtgtattaacgaacagagttgaatcttccattagacagagcagatttgaaacactctctttgtcgaattttcagtaggagattccaagcgctttaaggccaaaagtagaaaagggaatatcttcgtataaaagacagacagaatcattctcagaaactacttcatgatgtgtgcgttcaactcacagagtttaacctttcttttcatggagcagtttggaaacacactgttgtaaagtgggcaagtggacatttggacctctttgaggccttggttggaaacgagatttttcatataatgctagacagaagaattctcagttacttctttgtgctgtgtgtattcaactcacagagttctacattcctttagacagagcagatttgaaacacgctttttgtggaatttgcaagtggagatttcaagcgatttgaggccaatggtagaaaaggaaatatcttcatataaaaactcgacagaatcattctcacaaactgctttgtgttgtgtgcgttccacacacggagtttaacctttcttttcatagagcagtttgcaaactctctgtttgtaaagtctgcaagtggatattggacctctttgaggccttcattggtaacgggatttcttcatataatggtggacagaagaattctgagtaacttctttgtgttgtgggtattcacctcacagaattcaaccttcctttaggcagagcagatttgaaacactctttttgaggaatttgcaagtggagatttcaagcgctttgaggccaatggtagaaaaggaaatatcttcgtataatcaccagacagaatcattctcagaaactactttgtgatgtttgctttcaactcacagagtttaacctttcttttcatagagcagtttggaaacactctgtttgtaaagtctgcaagtggatattcggacgtctttgaggccttcgttggaatggggttttcttcatataatgctagaaagaagaattctcagtaacttttttgtgttgtgtgtattcaactcacagagttgaaccttcctttagacagagcaaatttgaaacactatttttgtggaatttgcaagtggagatttcaagcgctttgaggccaatggttgaaaagaataaacttcgtataaaaactagacagaatcattctcagaaactactttgtgatgtgtgtgttcaactcagggagtttaacctttcaattcacacagcagtttgaaaacactctgtttataaagtctgcaagtggatagttgcacctctttgacgtcttcgttggaaacgggatttcttcatatgatgctacgcagaagaatcacagnnnnnnnnnnnnnnnnnnnnnnnnnnnnnnnnnnnnnnnnnnnnnnnnnnnnnnnnnnnnnnnnnnnnnnnnnnnnnnnnnnnnnnnnnnnnnnnnnnnnnnnnnnnnnnnnnnnnnnnnnnnnnnnnnnnnnnnnnnnnnnnnnnnnnnnnnnnnnnnnnnnnnnnnnnnnnnnnnnnnnnnnnnnnnnnnnnnnnnnnnnnnnnnnnnnnnnnnnnnnnnnnnnnnnnnnnnnnnnnnnnnnnnnnnnnnnnnnnnnnnnnnnnnnnnnnnnnnnnnnnnnnnnnnnnnnnnnnnnnnnnnnnnnnnnnnnnnnnnnnnnnnnnnnnnnnnnnnnnnnnnnnnnnnnnnnnnnnnnnnnnnnnnnnnnnnnnnnnnnnnnnnnnnnnnnnnnnnnnnnnnnnnnnnnnnnnnnnnnnnnnnnnnnnnnnnnnnnnnnnnnnnnnnnnnnnnnnnnnnnnnnnnnnnnnnnnnnnnnnnnnnnnnnnnnnnnnnnnnnnnnnnnnnnnnnnnnnnnnnnnnnnnnnnnnnnnnnnnnnnnnnnnnnnnnnnnnnnnnnnnnnnnnnnnnnnnnnnnnnnnnnnnnnnnnnnnnnnnnnnnnnnnnnnnnnnnnnnnnnnnnnnnnnnnnnnnnnnnnnnnnnnnnnnnnnnnnnnnnnnnnnnnnnnnnnnnnnnnnnnnnnnnnnnnnnnnnnnnnnnnnnnnnnnnnnnnnnnnnnnnnnnnnnnnnnnnnnnnnnnnnnnnnnnnnnnnnnnnnnnnnnnnnnnnnnnnnnnnnnnnnnnnnnnnnnnnnnnnnnnnnnnnnnnnnnnnnnnnnnnnnnnnnnnnnnnnnnnnnnnnnnnnnnnnnnnnnnnnnnnnnnnnnnnnnnnnnnnnnnnnnnnnnnnnnnnnnnnnnnnnnnnnnnnnnnnnnnnnnnnnnnnnnnnnnnnnnnnnnnnnnnnnnnnnnnnnnnnnnnnnnnnnnnnnnnnnnnnnnnnnnnnnnnnnnnnnnnnnnnnnnnnnnnnnnnnnnnnnnnnnnnnnnnnnnnnnnnnnnnnnnnnnnnnnnnnnnnnnnnnnnnnnnnnnnnnnnnnnnnnnnnnnnnnnnnnnnnnnnnnnnnnnnnnnnnnnnnnnnnnnnnnnnnnnnnnnnnnnnnnnnnnnnnnnnnnnnnnnnnnnnnnnnnnnnnnnnnnnnnnnnnnnnnnnnnnnnnnnnnnnnnnnnnnnnnnnnnnnnnnnnnnnnnnnnnnnnnnnnnnnnnnnnnnnnnnnnnnnnnnnnnnnnnnnnnnnnnnnnnnnnnnnnnnnnnnnnnnnnnnnnnnnnnnnnnnnnnnnnnnnnnnnnnnnnnnnnnnnnnnnnnnnnnnnnnnnnnnnnnnnnnnnnnnnnnnnnnnnnnnnnnnnnnnnnnnnnnnnnnnnnnnnnnnnnnnnnnnnnnnnnnnnnnnnnnnnnnnnnnnnnnnnnnnnnnnnnnnnnnnnnnnnnnnnnnnnnnnnnnnnnnnnnnnnnnnnnnnnnnnnnnnnnnnnnnnnnnnnnnnnnnnnnnnnnnnnnnnnnnnnnnnnnnnnnnnnnnnnnnnnnnnnnnnnnnnnnnnnnnnnnnnnnnnnnnnnnnnnnnnnnnnnnnnnnnnnnnnnnnnnnnnnnnnnnnnnnnnnnnnnnnnnnnnnnnnnnnnnnnnnnnnnnnnnnnnnnnnnnnnnnnnnnnnnnnnnnnnnnnnnnnnnnnnnnnnnnnnnnnnnnnnnnnnnnnnnnnnnnnnnnnnnnnnnnnnnnnnnnnnnnnnnnnnnnnnnnnnnnnnnnnnnnnnnnnnnnnnnnnnnnnnnnnnnnnnnnnnnnnnnnnnnnnnnnnnnnnnnnnnnnnnnnnnnnnnnnnnnnnnnnnnnnnnnnnnnnnnnnnnnnnnnnnnnnnnnnnnnnnnnnnnnnnnnnnnnnnnnnnnnnnnnnnnnnnnnnnnnnnnnnnnnnnnnnnnnnnnnnnnnnnnnnnnnnnnnnnnnnnnnnnnnnnnnnnnnnnnnnnnnnnnnnnnnnnnnnnnnnnnnnnnnnnnnnnnnnnnnnnnnnnnnnnnnnnnnnnnnnnnnnnnnnnnnnnnnnnnnnnnnnnnnnnnnnnnnnnnnnnnnnnnnnnnnnnnnnnnnnnnnnnnnnnnnnnnnnnnnnnnnnnnnnnnnnnnnnnnnnnnnnnnnnnnnnnnnnnnnnnnnnnnnnnnnnnnnnnnnnnnnnnnnnnnnnnnnnnnnnnnnnnnnnnnnnnnnnnnnnnnnnnnnnnnnnnnnnnnnnnnnnnnnnnnnnnnnnnnnnnnnnnnnnnnnnnnnnnnnnnnnnnnnnnnnnnnnnnnnnnnnnnnnnnnnnnnnnnnnnnnnnnnnnnnnnnnnnnnnnnnnnnnnnnnnnnnnnnnnnnnnnnnnnnnnnnnnnnnnnnnnnnnnnnnnnnnnnnnnnnnnnnnnnnnnnnnnnnnnnnnnnnnnnnnnnnnnnnnnnnnnnnnnnnnnnnnnnnnnnnnnnnnnnnnnnnnnnnnnnnnnnnnnnnnnnnnnnnnnnnnnnnnnnnnnnnnnnnnnnnnnnnnnnnnnnnnnnnnnnnnnnnnnnnnnnnnnnnnnnnnnnnnnnnnnnnnnnnnnnnnnnnnnnnnnnnnnnnnnnnnnnnnnnnnnnnnnnnnnnnnnnnnnnnnnnnnnnnnnnnnnnnnnnnnnnnnnnnnnnnnnnnnnnnnnnnnnnnnnnnnnnnnnnnnnnnnnnnnnnnnnnnnnnnnnnnnnnnnnnnnnnnnnnnnnnnnnnnnnnnnnnnnnnnnnnnnnnnnnnnnnnnnnnnnnnnnnnnnnnnnnnnnnnnnnnnnnnnnnnnnnnnnnnnnnnnnnnnnnnnnnnnnnnnnnnnnnnnnnnnnnnnnnnnnnnnnnnnnnnnnnnnnnnnnnnnnnnnnnnnnnnnnnnnnnnnnnnnnnnnnnnnnnnnnnnnnnnnnnnnnnnnnnnnnnnnnnnnnnnnnnnnnnnnnnnnnnnnnnnnnnnnnnnnnnnnnnnnnnnnnnnnnnnnnnnnnnnnnnnnnnnnnnnnnnnnnnnnnnnnnnnnnnnnnnnnnnnnnnnnnnnnnnnnnnnnnnnnnnnnnnnnnnnnnnnnnnnnnnnnnnnnnnnnnnnnnnnnnnnnnnnnnnnnnnnnnnnnnnnnnnnnnnnnnnnnnnnnnnnnnnnnnnnnnnnnnnnnnnnnnnnnnnnnnnnnnnnnnnnnnnnnnnnnnnnnnnnnnnnnnnnnnnnnnnnnnnnnnnnnnnnnnnnnnnnnnnnnnnnnnnnnnnnnnnnnnnnnnnnnnnnnnnnnnnnnnnnnnnnnnnnnnnnnnnnnnnnnnnnnnnnnnnnnnnnnnnnnnnnnnnnnnnnnnnnnnnnnnnnnnnnnnnnnnnnnnnnnnnnnnnnnnnnnnnnnnnnnnnnnnnnnnnnnnnnnnnnnnnnnnnnnnnnnnnnnnnnnnnnnnnnnnnnnnnnnnnnnnnnnnnnnnnnnnnnnnnnnnnnnnnnnnnnnnnnnnnnnnnnnnnnnnnnnnnnnnnnnnnnnnnnnnnnnnnnnnnnnnnnnnnnnnnnnnnnnnnnnnnnnnnnnnnnnnnnnnnnnnnnnnnnnnnnnnnnnnnnnnnnnnnnnnnnnnnnnnnnnnnnnnnnnnnnnnnnnnnnnnnnnnnnnnnnnnnnnnnnnnnnnnnnnnnnnnnnnnnnnnnnnnnnnnnnnnnnnnnnnnnnnnnnnnnnnnnnnnnnnnnnnnnnnnnnnnnnnnnnnnnnnnnnnnnnnnnnnnnnnnnnnnnnnnnnnnnnnnnnnnnnnnnnnnnnnnnnnnnnnnnnnnnnnnnnnnnnnnnnnnnnnnnnnnnnnnnnnnnnnnnnnnnnnnnnnnnnnnnnnnnnnnnnnnnnnnnnnnnnnnnnnnnnnnnnnnnnnnnnnnnnnnnnnnnnnnnnnnnnnnnnnnnnnnnnnnnnnnnnnnnnnnnnnnnnnnnnnnnnnnnnnnnnnnnnnnnnnnnnnnnnnnnnnnnnnnnnnnnnnnnnnnnnnnnnnnnnnnnnnnnnnnnnnnnnnnnnnnnnnnnnnnnnnnnnnnnnnnnnnnnnnnnnnnnnnnnnnnnnnnnnnnnnnnnnnnnnnnnnnnnnnnnnnnnnnnnnnnnnnnnnnnnnnnnnnnnnnnnnnnnnnnnnnnnnnnnnnnnnnnnnnnnnnnnnnnnnnnnnnnnnnnnnnnnnnnnnnnnnnnnnnnnnnnnnnnnnnnnnnnnnnnnnnnnnnnnnnnnnnnnnnnnnnnnnnnnnnnnnnnnnnnnnnnnnnnnnnnnnnnnnnnnnnnnnnnnnnnnnnnnnnnnnnnnnnnnnnnnnnnnnnnnnnnnnnnnnnnnnnnnnnnnnnnnnnnnnnnnnnnnnnnnnnnnnnnnnnnnnnnnnnnnnnnnnnnnnnnnnnnnnnnnnnnnnnnnnnnnnnnnnnnnnnnnnnnnnnnnnnnnnnnnnnnnnnnnnnnnnnnnnnnnnnnnnnnnnnnnnnnnnnnnnnnnnnnnnnnnnnnnnnnnnnnnnnnnnnnnnnnnnnnnnnnnnnnnnnnnnnnnnnnnnnnnnnnnnnnnnnnnnnnnnnnnnnnnnnnnnnnnnnnnnnnnnnnnnnnnnnnnnnnnnnnnnnnnnnnnnnnnnnnnnnnnnnnnnnnnnnnnnnnnnnnnnnnnnnnnnnnnnnnnnnnnnnnnnnnnnnnnnnnnnnnnnnnnnnnnnnnnnnnnnnnnnnnnnnnnnnnnnnnnnnnnnnnnnnnnnnnnnnnnnnnnnnnnnnnnnnnnnnnnnnnnnnnnnnnnnnnnnnnnnnnnnnnnnnnnnnnnnnnnnnnnnnnnnnnnnnnnnnnnnnnnnnnnnnnnnnnnnnnnnnnnnnnnnnnnnnnnnnnnnnnnnnnnnnnnnnnnnnnnnnnnnnnnnnnnnnnnnnnnnnnnnnnnnnnnnnnnnnnnnnnnnnnnnnnnnnnnnnnnnnnnnnnnnnnnnnnnnnnnnnnnnnnnnnnnnnnnnnnnnnnnnnnnnnnnnnnnnnnnnnnnnnnnnnnnnnnnnnnnnnnnnnnnnnnnnnnnnnnnnnnnnnnnnnnnnnnnnnnnnnnnnnnnnnnnnnnnnnnnnnnnnnnnnnnnnnnnnnnnnnnnnnnnnnnnnnnnnnnnnnnnnnnnnnnnnnnnnnnnnnnnnnnnnnnnnnnnnnnnnnnnnnnnnnnnnnnnnnnnnnnnnnnnnnnnnnnnnnnnnnnnnnnnnnnnnnnnnnnnnnnnnnnnnnnnnnnnnnnnnnnnnnnnnnnnnnnnnnnnnnnnnnnnnnnnnnnnnnnnnnnnnnnnnnnnnnnnnnnnnnnnnnnnnnnnnnnnnnnnnnnnnnnnnnnnnnnnnnnnnnnnnnnnnnnnnnnnnnnnnnnnnnnnnnnnnnnnnnnnnnnnnnnnnnnnnnnnnnnnnnnnnnnnnnnnnnnnnnnnnnnnnnnnnnnnnnnnnnnnnnnnnnnnnnnnnnnnnnnnnnnnnnnnnnnnnnnnnnnnnnnnnnnnnnnnnnnnnnnnnnnnnnnnnnnnnnnnnnnnnnnnnnnnnnnnnnnnnnnnnnnnnnnnnnnnnnnnnnnnnnnnnnnnnnnnnnnnnnnnnnnnnnnnnnnnnnnnnnnnnnnnnnnnnnnnnnnnnnnnnnnnnnnnnnnnnnnnnnnnnnnnnnnnnnnnnnnnnnnnnnnnnnnnnnnnnnnnnnnnnnnnnnnnnnnnnnnnnnnnnnnnnnnnnnnnnnnnnnnnnnnnnnnnnnnnnnnnnnnnnnnnnnnnnnnnnnnnnnnnnnnnnnnnnnnnnnnnnnnnnnnnnnnnnnnnnnnnnnnnnnnnnnnnnnnnnnnnnnnnnnnnnnnnnnnnnnnnnnnnnnnnnnnnnnnnnnnnnnnnnnnnnnnnnnnnnnnnnnnnnnnnnnnnnnnnnnnnnnnnnnnnnnnnnnnnnnnnnnnnnnnnnnnnnnnnnnnnnnnnnnnnnnnnnnnnnnnnnnnnnnnnnnnnnnnnnnnnnnnnnnnnnnnnnnnnnnnnnnnnnnnnnnnnnnnnnnnnnnnnnnnnnnnnnnnnnnnnnnnnnnnnnnnnnnnnnnnnnnnnnnnnnnnnnnnnnnnnnnnnnnnnnnnnnnnnnnnnnnnnnnnnnnnnnnnnnnnnnnnnnnnnnnnnnnnnnnnnnnnnnnnnnnnnnnnnnnnnnnnnnnnnnnnnnnnnnnnnnnnnnnnnnnnnnnnnnnnnnnnnnnnnnnnnnnnnnnnnnnnnnnnnnnnnnnnnnnnnnnnnnnnnnnnnnnnnnnnnnnnnnnnnnnnnnnnnnnnnnnnnnnnnnnnnnnnnnnnnnnnnnnnnnnnnnnnnnnnnnnnnnnnnnnnnnnnnnnnnnnnnnnnnnnnnnnnnnnnnnnnnnnnnnnnnnnnnnnnnnnnnnnnnnnnnnnnnnnnnnnnnnnnnnnnnnnnnnnnnnnnnnnnnnnnnnnnnnnnnnnnnnnnnnnnnnnnnnnnnngtagaaaaggaaatatcttcgcataataacaggacagaatcattcccagaaactgcgttatgatgtgtgcgtttaactcacagagtgaaacctttcttttcatagagcagtttggaaacactctgtttgtaaagtctgcaagtggatatttggacctacttgaggccttcgttgcaaacgggattttttcatataatgctagacagaagaattctcagtaacctccttgtgttgtgtgtattcaactcacagagttgaaacttcctttagacagagcagatttgaaatactcttttcgtggaatgtgcaagtggagatttcaagcgctttgaggccaatagtagaaaaggaaatatcttcgtataaaacctagacagaatcattcccagaaacagcgttgtgatgtgtgcgttcaacatacagatttaacatttcttttcatagagcatttaggaaacactctgtttgtaaagtctgcaagtggatatttggacctccttgaggccttcgttggaaacgggatttcctcatataatgctagaccgaagaattctcagtaacttccttgtgttgtgtgtattccactgacaacagctgagcctacctttagacagagccgatttgaaacactctttttgtggaatttgcaagtggagatttcaagcgctttaagttcaatgctagaaaaggaaatatcttcgtatgaaaactagacagaatcattcccaaaaactgctttgtgatgtgtgcgtagaacacacagagtttaacctttcttttcatagagccctttggaaacactctgttggtcaaactggaagtcgatattctgatctctttgaggccttcgttggaaactggatttcttcatataatgctagacagaagaattctcagtaacttccttttgttgtgtgtactcaactcacagaggtgaacgttcctttagacacagcagatttgaaaccctctttttgtggaatttgcaagtggagatttcatgtgccttgaggccaaaggcagaaaaggaaatatcttagtagaaaaacaagacagaatcattctcagaaactgctttgtgatgtatgcattcaactcaaagagtttatccttacttttcgtacagcagtttggaaacactctgttggaaaagtctgcaaacggatattttgatctctttgaggccttctttggaaacgggttttattcatgtaaggctagacagaaaaattctcagtaacatctttgtgttgtgtgtattaagctgacagagttgacacttcctctagacagagcagatttgaaacactctttttgaggaatttgcaagtgtagatttcaaaccctttgaggtcaatggtagaaaaggaaatatcttcgtataaaaactaggcagaatgattctcagaaagtgctatgtgatgtgtgcgttcaactcaaagagttttaactttcttttcatagagcagttaggaaacactctgtttgtcaaatctgcaagtcgatattcggaactagttgaggccttctttggaaacgggatttcctcatataatgctagaaagaggaattcccagtaacttccttgtgttgtgtgtactcaactcacacaggtgaactttcctttagacagagaagatttgaaacactctttttgtggaatttcaattggagatttcaagtgctttgaggccaatggtagaaacgaaatatcttcgtataaaaacaagacaaaatcattcccagaaactgtgttgtgatgtgtgcgttcaactcacagagtttaacctttcttttcattgagcagtttggataaagtctgtttttaaagtctgcaagtgtatatttggacttcttagatgccttagttggaaacgggatttcttcatataatgctagagagaagaattcttagtaactcctttgtgttgtgtgcattcaactgacagaggtgaatcttccattagacagagcagatttgaaaaacgctttttgtggaatttgcaggtggagatttcaagcggtttaaggccaatggaagaaaaggaaatatcttagtataaaaactagacagaatcattctcagaaactgatctgtgatgtgtgctttcaactcacagtttaaattttcttttcattccgcagtttggaaacactctgtttgtaaagtctgcaagtggatattttgtcctctttgagaccttcgttggaaacgggtttttttcatgaaatgctagacagaagaattctcagtaacttccttgttttgtgtgtattcaactcacagagttgaacgttcctttagacacagcagatttgaaacactctttttgtggaatttgcaagtggagatttcaagcgctttttggtcaattgcagaaatggaaatatcttcgtttcaaaactagacagaatcattcccagaaactgcgttgtgatctgggcgttcaactcacagagtttcacctttcttttcattcagcaatttggaaacactctgtttgaaaagtcagcaagtggatatttggacctccttgaggagttccttggaaacgggatttcctcatttaaggctagacagaagaattttcagtaacttcctcgtgttgtgtgtattcaactgacagagttgaaccttccttcagacagagcagattagaaacactctttttgtggaatttgcaagtggagatttcaaacgctttgaggccaacggtagaaaaggaaatatcttcgtataaaaactacacagaatctttcccataaactgctttgtcatgtgtgcgttcaactcacagagtttaacctttctgctcatacagcagtttggaaacactctgtttgtaaagtctgcaagtggatattttgacctctttgacgccgtcgttggaaacgggatttcttcatataacgctagacagaagaattctaagtaagtcctttgtgttgtctgtgttcaactcacagatgtgtacgttcctttaggcagagcagacttgaaacactcttttttgtggaatttgcaagtggagatttcgagcgctttcaggtcaatgatagaaaaggaaatatcttcgtataaaaacaagacaaaatcattcccagaaactgcgtagtgatgtgtctgtttaactaacagagtttaacctttcttttcgtacagcattttggaaacactctgttggtaaagtctgcaagtggatatttggaccacttaggtgacttcgttggaaaagggatttcttcttacaatgctagagagaagaattcttagtaacttctttgtgttgtgtgtattcaactgacagagttgagcattcctttagacagagcagacttgaaacactctttttgtggaatttgcaattagaaatttcaagcgctttgaggccaaaggcagaagaggaaatatcttcgtataaaaacaagtcagaatcattctcagaaactgctttatcatgtgtgcgttcaactcacggagtttaacctaccttttcatacagcagtttgcaaacactctgtttgtaaagtctgcaagtagatatttggacatctttgaggccttcgttggaaacgggttttattcatgtaaggctagacagaagatttctcagtaacttctttgtgttgtgtgtattcaactgacagagttgacccttcttttagacagagcagatttgaaacactctttttgtggaatttgcaagtggagatttcagacgctttgaggtcaatggtagaaaaggaaatttcttcgtataaaaacttgacagaatgattctcagaaactgcttcgtgatgtatgcgttcaattcaaannnnnnnnnnnnnnnnnnnnnnnnnnnnnnnnnnnnnnnnnnnnnnnnnnnnnnnnnnnnnnnnnnnnnnnnnnnnnnnnnnnnnnnnnnnnnnnnnnnnatcatttccacaaactgcgttgtgatgtgttcgttcaactcacagagtttaacttttcttttcatagagcagttaggaaacactctgttggtaaattctgtaagtggatattctgacatcttgtggccttcgttggaaacgggatttcttcatattctgctagacagaagaattctcagtaacttccttgtgttgtgtttattcaactctgtgagttgaatgatcctttacacagagcagacttgaaacactctttttgtggaatttgcaagtggagatttcagccgctttgaggtcaatggtagaaaagtaaatatcttcgtataaagactagacagaatgattctcagaaactcctttgtgatgtgtgcgttcaactcacagagtttaacttttcttttaatagagcagttaggaaacactctgtttgtaaagtctgcaagtggatattcagacctctttgaggccttcgttggaaacgggatttcttcatattatgctagacagaagaattctcagtaaccttccttgtgttgtgtgtattcaactcacagagttgaacgatcctttacagagagcaggcttgaaacactctttttgtcgaatttgcaagtggagatttcagccgctttgaggtcaatggtagaataggaaatatcttcttatagaaactagacagaatgattctcataaactcctttgtgatgtgtgcgtccaactcacagagtttaacctttcttttcatagagcagttaagaaacactctgtttgtaaagtctgcaagtggatattcagacctccttgaggccttcgttggaaacggggtttcttcatattctgctagacagaagaattcccagtaactttcttgtgttgtgtgtgttcaactcacagagttgaactttcatttacacagagcagatttgaaacaccctttttgtggaatttgcaaatggagatttcaagcgctttgaggccaaaggcagaaaaggaaatatcttcgtataaaaactagacagaatcattctcagaaactgctctgcgatgtgtgcgttcaactctcagagtttaacttttcttttcattcagcagtttggaaacactctgtttgtaacgtctgcacgtgaataatttgaccacttagaggccttcgttggaaacgggtttttttcatgtaaggctagacagaagaattctcagtaacttcccttgtgttgtgtgtattcaactcacagaattgaacgatcctttacacagagcagacttgaaacactctttttgtggaatttgcaagtggagatttcagccgctttgaggtcaatggtagaataggaaatatcttcgtagaaaaactagacagaaatgattctcagaaacttctttgtgatatgtgcgttcaactcacagagtttaacctttcttttcatagagcagttaggaaacactctgtttgtaaactctgcaagtggatattcagacctctttgaggccttcgttggaaacgggatttcttcatactgtgctagacagaagaattctcagtaacttccttgtgttgtgtgtattcaactcacagagttgaacgatcctttacagagagcagacttgaaacactgtttttgtggaatttgcaagtggagatttcaagagctttggggccaaaggcagaaaaggaaatatcttcgtataaaaactagacagaaatcattctcagaaactgctctgcgatgtgtgcgttcaactctcagagtttaacttttcttttcattcagcagtttggaaacactctgtttctaaagtctgcacgtggatattttgaccacttagaggccttcgttggaaacgggtttttttcctgtaaggctagacagaagaattcccagtaacttccttgtgttgtgtgcattcaactcacagagttgaacgttcccttagacagagcacatttgaaacactctatttgtgcaatttgcaattgtagatttcaagcgctttaaggtcaatggcagaaaaggaaatatcttcgttttaaaactagacagaatcattcccacaaactgcgttgtgatgtgttcgttcaactcacagagtttaacctttctgttcatagagcagttaggaaacactctgtttgtaaagtctgcaagtggatattcagacctccttgaggccttctttggaaaagggatttcttcatattctgctagacagaagaattctcagtaacttccttgtgttgtgtgtattcaactcacagagttcaacgatcctttccacagagcagacttgaaacactctttttgtggaatttgcaagtggagatttcagcggctttgaggtcaatggtagaataggaaatatcttcctatagaaactagacagaatgactctcagaaacttctttgtgatgtgtgcgttcaactcacagaatttaacctttcttttcatagagcagttaggaaacactctgtttgtaaactctgcaagtggatattcagacctctttgaggccttcgttggaaacgggatttcttcatactatgctagacagaagaattctcagtaactttcttgtgttgtgtgtattcaactcacagagttgaatgatcctttacacagagcagacttgaaacactctttttgtggaatttgcaagtggagatttcagccgctttgagttcaatggtagaataggaaatatcttcctatagaaactagacagaatgattctcagaaactcctttgtgatgtgtgcgttcaactcacagagtttaacctttcttttcatagagcagttgggaaacactctgtttgtatagtctgcaagtggatattcagacctctttgaggccttcgttggaaacgggatttcttcatattctgctagacagaagaattcccagtaacttccttgtgttgtgtgtgttcaactcacagagttgaactttcatttacacagagcagatttgaaacactctttttgtggaatttgcaagtggagatttcaagcgctttgaggtcaaaggcagaaaaggaaatatcttcgtataaaaactagacagaaatctttctcagaaactgctctgggatgtgtgcgttcaactcacagagtttaacttttcttttcattcagcagtttggaaacactctgtttggaaagtctgcacgtggatattttgacctctttgaggccttcgttggaaacgggtttttttcatgtaaggctagacagaagaattcccagtaacttccttgtgttgtgtacattcaactcacagagttgaacgttcccttagacagagcagatttgaaacaccctttttgtgcaattggcaagtggagatttcaagcgctttaaggtcaatggcagaaaaggaaatatcttcgtttcaaaactagacagaatcattcccacaaactgcgttgtgatgtgttcgttcaactcacagagtttaacctttctgttcatagagcagttaggaaacactctgtttgtaaagtctgcaagtgcatattcagacctctttgaggccttcgttggaaacgttatttcttcatattatgctagacagaagaattctcagtaacttccttgtgttgtgtgtattcacctcacagagttgaacgatcctttacacagagcagacttgtaacactctttttgtggaatttgcaagtggagatttcagccgctttgaagtcaaaggtagaaaaggaaaaatcttcctataaaaactagacagaatgattctcagaaactcctttgtgatgtgtgcgttcaactcacagagtttaacctttcttttcatagagcagttaggaaacactctgtttgtaaagtctgcaagtggatattgagacctcttcgaggccttcgttggaaacgggtttttttcatataaggctagacagaagaattctcagtaacttccttgtgttgtgtgtattcaactcacagagttgaacgatcctttacacagagcagacttgtaacactctttttgtggaatttgcaagtggagatttcagccgctttgaagtcaaagttagaaaaggaaatatcttcctataaaacctagacagaatgattctcagaaactcctttgtgatgtgtgcgttcaacacacagagtttaacttttcttttcatagagcagttagtaaacactctgtttataaagtctgcaagtggatattcagacccctttgaggccttcgttggaaacgggatttcttcatattatgatagacagaagaattcccagtaacttccttgtgttgtgtgtgttcaactcacggagttgaactttgatttacacagagcagatttgaaacactctttttgtggaatttgcaagtggagatttcaagcgctttgaggccaaaggcaggaaagggaatatcttcgtataaaaactagacagaatcattctcagaaactgctctgtgatgtgtgcgttcaactctcagagtttaacttttcttttcattcagcagtttggaaacactctgtttgtaaagtctgtacgtggataatttgaccacttagaggccttcgttggaaacgggtttttttcatgtaaggctagacagaagaattctcagtaacttccttgtgttgtgtgcattcaactcacagagttgaacgatcctttacacagagcagacttgaaacactctttttgtggaatttgcaagtggagatttcagccgctttgagttcaatggtagaataggaaatatcttcctatagaaactagacagaatgattctcagaaactcctttgtgatgtgtgcgttcaactcacagagtttaacctttcttttcatagagcagttaggaaacactgtgtttgtaaagtctgcaagtggataatcagacctctttgaggccttcgttggaaacgggatttcttcatattctgcaagacagaggaattcttagtaacttctttgtattgtgtgtattcaactcacagagttgaaccttcttttagatagagtagatttgaaacacactttttgtggaattcccaattggagatttcaagcgctttggggccaatggtagaaaaggaaaaatcttcacataaaaactagacaaaatcattctcagaaactgctctgcgatgtgtgcgttcaactctcagagtttaacttttcttttcattcagcagtttggaaacactctgtttgtaaagtctgcacgtggatattttgaccacttagagggcttcgttggaaatgggtttttttcctgtaaggctagacacaagaattctcagtaacttccttgtgttgtgtgtattcaactcacagatttgaacgatcctttacacagagcagacttgaaacactctttttgtggaatttgcaagtggagatttcagccgctttgaggtcaatggtagaaaaggaaatatcttcgtatagaaacaagacagaatgattctcagaaaatcctttgtgatgtgtgcgttcaactcacagaatttaacttttcttttcatagagccgtttggaaacactctgtttgtaaagtctgcaagtggatattcagacctctttcaggccttcgttggaaacgggatttcttcatattatgctagacagaggaattcccagtaacttccttgtgttgtgtgtgttcaactcacagagttgaactttcatttacacagagcagatttgaaacactctttttgtggaatttgcaaatggagatttcaagcgctttgaggccaaaggaagaaaaggaaatatcttcgtttcaaaactagacagaatcattctcagaaactgctgcgtgatgtgtgcgttcaactctcagagtttcacttttcttttcattcagcggtttggaaacactctgtttgtaaagtctgcacgtggatattttgaccacttagacgccttcgttggaaacgggtttttttcatgtaaggctagacagaagaattcccagtaacttccttgtgttgtgtacattcaactcacagcgttgaacgttcccttagacagagcagatttgaaacactctttttgtgcaattggcaagtagtgatttcagccgctttgaggtcaatggtagaaaaggaaatatcttcgtataaaaactagacagaatcattcccacaaactgcgatgtgatgtgttcgttcaactcacagagtttaacctttctgttcatagagcagttaggaaacactctgtttgtaaagtctgtaagtggatattctgacatcttgtggccttcgttggaaacgggatttcttcatattctgctagacagaataattctcagtaacttccttgtgttgtgtgtattcaactgacagagttgaaggatcctttacagagagcaggcttgaaacactctttttgtcgaatttgcaagtggagatttcagccgctttgaggtcaatggtagaataggaaatatcttcttatagaaactagacaaaatgattctcagaaacttctttgtgatgtgtgcgttcaactcacagagtttaacctttcttttcatagagcaggtaggaaacactctgtttgtaaactctgcaagtggatattcagacctctttgaggccttcgttggaaacgggatttcttcatactatgctagacagaagaattctcagaatcttccttgtgttgtgtgtatccaactcacagagttgaacgatggtttacacagagcagatttgaaacactctttttgtggaatttgcaagtggagatttcagccgctttgaggtccatggtagaaaaggaaatatcttcgtataaaaactaaacagaatgattctcataaattcctttgtgatgtgtgcgttcaactcacaaagtttaacctttcttttcatagagcagttaggagacactctgtttgtaaagtctgcaagtggatattcagacctctttgaggccttcgttggaaacgggatttcttcatattatgctagacagaagatttctcagtaacttccttgtgttgtgtgtattcaactgacagagttgaactttcatttagagagagcagatttgaaacactctttttgtggaatttgcaagtggagatttcaagcgctttggggccaaaggcagaaaaggaaatatcttcgtataaaaactagacagaatcattctcataaactgctctgcgatgtgtgcgttcaactctccgagtttaacttttcttttcattcagcagtttggaaacactctgtttgtaaagtctgcacgtggataatttgaccacttagaggccttcgttggaaacggtttttttttcatgtaaggctagacagaagaattcccagtaacttccttgtgttgtgtgcattcagctcacagagttgaacgttcccttagagagagcagatttgaaacacactttttgtgcaattggcaagtggagatttcaagcgctataaggtcaatggcagaaaaggaaatatcttcgtttcaaaactagacagaatcattcccacaaactgcgttgtgatgtgttcgttcaactcacagagtttaacctttctgttcatagagcagttaggaaacactctgtttctaaagtctgaaagtgcatagtctgacatcttgtggccttcgttggaaacgggatttcttcatattctgctagacagaagaattctcagaatcttccttgtgttgtgtgtattcaactcacagagttgaacgatcctttacacagagcagacttgaaacactctttttgtggaatttgcaagtggagatttcagccgctttgaggtcgatggtagaaaaggaaatatcttcgtataaaaactagacagaatcattctcagaaactgctctgcgatgtgtgcgttcaactctcagagtttaacttttctttccattcagcagtttggaaacactctgtttgtaaagtctgcacgtggatattttgaccacttagaggccttcgttggaaacgggtttttttcatgtaaggctagacagaagaattctcagtaacttccttgtgttgtgtgtattcaactcccagagttgaacgatcctttacacagagcagacttgtaacactctttttgtggaatttgcaaatggagatttcagccgctttgaagtcaaaggtagaaaaggaaatatcttcctataaaaactagacagaatgattctcagaaactcctttgtgatgtgtgcgttcaactcacagagtttaacttttcttttcatagagcagttaggaaacactctgtttgtaaagtctgcaggtggatattcagacctctttgaggccttcgttggaaacgggatttcttcatattatgctaggcagaagaattctcagtaacttccttgtgttgtgtgtattcaactgacagagttgaactttcatttagagagagcagatttgaaacactgtttttgtggaatttgcaagtggagatttcaagcgctgtggggccaaaggcagaaaaggaaatatcttcgtataaaaactagacataatcattctcagaatctgctctgtgatgtgtgcgttcaactctcagagtttaacttttcttttcattcagcagtttggaaacactctgtttgtaaagtctgcacgtggataattagaccacttagaggccttcgttggaaacgggtttttttcatgtaaggctatacagaagaattcccagtaacttccttgtgttgtgtacattcaactcacagagttgaacgttcccttagacagagcagatttgaaacactctttttgtgcaattgggaagtggagatttcaagcgctttaaggtcaatagcagaaaaggaaatatcttcgtttcaaaactagacagaatcattcccacaaactgcgttgtgatgtgttcgttcaactcacagagtttaacctttctgttcatagagcagttaggaaacactctgtttgttaagtctgtaagtggatattctgacatcttgtggccttcgttggaaacgggatttcttcatattctgctagacagaagaattcccagtaacttccttgtgttgtgtgtgttcaactcacagagttgaactttcatttacacagagcagatttgaaacactctttttgtggtatttgcaaatggagatttcagccgcgttgaggtcaatggtagaaaaggaaatatcttcgtttcaaaactagacagaacgattctcagaaactcctttgtgatgtgtgcgttcaactcacagagtttaacctttcttttcatagagcagttaggaaacactctgtttgtaaagtctgcaagtggatattcagacctccttgaggccttcgttggaaacgggatttcttcatattctggtagacagaagaattctcagtaacttccttgtgttgtgtttattcaactcacagagttgaatgatcctttacacagagcagacttgaaacactctttttggggaatttgcaagtggagatttcagccgctttgaggtcaatggtagaaaagtaaatatcttcgtataaagactagacagaatcattctcagaaactgctgcgtgatgtgtgcgttcaactctcagagtttaacttttcttttcattcagcggtttgtaaacactctgtttgtaaagtctgcacgtggatattttgaccacttagaggccttcgttggaaacgggttttttgcatgtgaggctagacagaagaattcccagtaacttccttgtgttgtgtgcattcaactcacagagttgaacgttcccttagacagagcagatttgaaacactctatttgtgcaatttgcaagtgtagttttcaagctctttaagatcaacggcagaaaaggaaatatcttcgtttcaaaactagacagaatcattcccacaaactgcgttgtgatgtgttcgttcaactcacagagtttaacttttccgttcatagagcagttaggaaacactctgtttgtaaagtctgcaagtggatattcagacctccttgaggccttcgttggaaacgggatttcttcatattctgctagacagaagaatgctcagtaacttccttgtgttgtgtttattcaactcacagagttgaacgatcctttacacagagcagacttgaaacactctttttgtggaatttgcaagtggagatttcagccgctttgaggtcaatggtagaaaaggaaactatcttcatataaagattagacagaatgattctcagaaactcctttgtgatgtgtgtgttcaactcacagagtttaacctttcttttcatagagcagttagtaaacactctgtttataaagtctgcaagtagatattcagacccctttgaggccttcgtcggaaacgggatttcttcatattatgctagacagaagaattctcagtaacttccttctgttgcgtgtattcaactcacagagttgaacgatcctttacacagagcagacttgaaacactctttttgtggaatttgcaagtggagatttcagccgctttgaggtcaatggtagaataggaaatatcttcctatagaaactagacagaatgattctcagaaactcctttgtgatgtgtgcattcaactcacagagtttaacctttcttttcatagagcagttaggaaacactctgtttctaaagtctgcaagtggatattcagacatctttggggccttcgttggaaacgggatttcttcatgttctgctagacagaagaattctcagtaactttccttgtgttgtgtgtgttcaactcacagagttgaacgatcctttacacagagcagacttgtcacactctttttgtggaatttgcaagtggagatttcagccgctttgaagtcaaaggtagaaaaggaaatatcttcctataaaaactagacagaatgattctcagaaactcctttgtgatgtgtgtgttcaactcacagagttcaacctttcttttcatagagcagttagtaaacactctgtttataaagtctgcaagtggatattcagacccctttgaggccttcgttggaaacgggatttcttcttattatgctagacagaagaattctcagaatcttccttgtgttgtgtgtattcaactcacagatttgaacgatggtttacacagagcagatttgaaacactctttttgtggaatttgcaagtggagatttcagccgctttgaggtcaatggtagaaaaggaaatatcttcgtataaaaactagacagaacgatcctcagaaactcctttgtgatgtgtgcgttcaactcacagagtttaacttttcttttcatagagccgttaggaaacactctgtttgtaaagtctgcaagtggatattcagacctctttgaggccttcgttggaaacgggatttcttcctattctgctagacagaagaattctcagaaacttcccctgtgttgtgtgaattcaactcacagagttgaacgatcctttacacagagcagacttgaaacactctttttgtggaatttgcaagtggagatttcagccgctttgaggtcaatggtagaatagggaatatcttcctatagaaactagacagaatgattctgagaaactcctttgtgatgtgtgcgttcaactcacagagttcaacctttcttttcctagagcagttgggaaacactctgtttgtaaagtctgcaagtggatattcagacttctttgaggccttcgttggaagcgggatttcttcatattctgccatacagaagaattctcagtaacttcattgtgttgtctgtattcaactcacagagttcaacgatcctttacacagagcagacttgaaacactctttttctggaatttgcaagtggagatttcagccgctttgaggtcaatggtagaaaaagaaatatcttcctataaaaactagacagaatcattcccacaaactgcgttgtgatgtgttcgttcaactcacagagtttaacctttctgttcatagagcagttaggaaacactctgtttgtaaagtctgtaagtggatattctgacatcctgtggccttcgttggaaacgggatttcttcatattctgctagacagaagaattctcagtaacttccttgtgttgtgtgtattcaactcacagagttgaacaatcctttacacagagcggacttgaaacactctttttgtggaatttgcaagtggagattttagccgatttgaggtcaatggtagaataggaaatatcttcctatagaaactagacagaatgattctcagaaactcctttgtgatgtgtgcgttcaactcacagagtttaacctttcttttcatagagcagttaggaaacactctgtttgtaaagtctgtaagtggatattcagacctctttgaggccttcgttggaaacgggatttcttcatattgtgctagacacaagaattctcagtaacttccttgtgttgtgtggattcaactcacagagttgaacgatcctttacacagagcagacttgaaacactctttttgtggaatttgcaagtggagatttcagccgctttgggttcaatggtagaataggaaatatcttcctatagaaactagacagaatcattcccacaaactgcgttgtgatgggttcgttcaactcacagagtttaacctttccgttcatagagcagttaggaaacacactgtttgtaaagtctgtaagtggatattctgacatcttgtggccttcgttggaaacgggatttcttcatattctgctagacagaagaattctcagtaactttccttgtgttgtgtgtattcaactcacagagttgaacgatcctttacagagagcagacttgaaacactctttttgtggaatttgcaagtggagatttcagccactttgaggtcaatggtagaaaaggaaatatcttcgtataaagactagacagattgattctcagaaactcctttttgatgtgtgtcttcaactcacagagtttaaactttcttttcatagagcagttaggaaacactctgtttgtatactctgcaagtggatattcagacctctttgaggccttctttggaaaagggatttcttcatattgtgctagacagaagaattctcagtaactttccttgtgttgtgtgtattcaactcacagagttgaacgatcctttacacagagcggacttgaaacactctttttgtggaatttgcaagtggagatttaagccgcgttgaggtcaatggtagaaaaggaaatatcttcgtataaaaactagacagaatgattctccgaaactcctttgtgatgtgtgcgttcaactcacagagtttaacctttctgttcatagagctgttaggaaacactctgtttgtaaagtctgcaagtggatattcagacctccttgaggccttcgttggaaacgggatttcttcatattctgctagacagaagaattctcagtaacttccttgtgttgtgtgtattcaactcacagagttgaactgatcctttacacagagcagacttgaaacactctttttgtggaatttgcaagtggagatttcagccgctttgaggtcagtagtagaaaaggaaatatcttcgtagaaaaactagacagaatgattctcagaaactcctttgtgatgtgggcgttcaactcacagagtttaacctttcttttcatagagcagttaggaaacactctgtttgtaaagtctgcaagtggatacttggacttctttgaggccttcgttggaaacgggtttttttcatgtaaggctagacagatgaattctcagtaacttccttgtgttgtgtgtattcaactcacagagttgaacgatcctttacacagagcagatttgaaacactgtttttctggaatttgcaagtggagatttcagccgctttgaggtcaatggtagaaaaggaaatatcttcgtataaaaactagacagaatgattctcagaaactcctttgtgatgtgtgcgttcaactcacagagtttaacctttcttttcatagagcagttaggaaacactctgtttgtaaagtctgcaagtggatattcagacatctttgaggctttcgttggaaacgggatttcttcatattctgctagacagcagaattctcagtaacttccttgtgttgtgtgtattcaactaacagagttgaacgatcctttacacagagcagacttgaaacactctttttgtggaatttgcaagtggagatttcagccgctttgagttcaatggtagaataggaaatatcttcctatagaaactagacagaatgattctcagaaaatcctttttgatgtgtgcgttcaactcacagagtttaacttttcttttcatagagcagttaggaaacactctgtttgtaaagtctgcaagtggatattcagacctctttgaggccttcgttggaaacgttatttcttcatattatgctagacagaagaattctcagtaactgccttgtgttgtgtgtattcaactcacagagttgaacgatcctttacacagagcagacttgaaacactccttttgtggaatttgcaagtggagatttcagccgctttgaagtcaatggtagaataggaaatatcttcctatagaaactagacagaatgattctcataaactcctttgtgatgtgtgcgttcaactcacagagtttaacctttcttttcatagagcatttaggaaacactctgtttgtaaagtctgcaagtggatattcagacctctttgaggccttcgttgaaaacgggatttcttcatattctgctagacagaagaattctcagaaacttccttgtgttgtgtgttttcaactcacagagttgaacgatcctttacacagagcagacttgaaacactccttttgtggaatttgcaagtggagatttcagccgctttgaggtcaatggtagaataggaaatatcttcctatagaaggtagacagaatgattctcataaactcctttgtgatgtgtgcgttcaactcacagagtttaacctttcttttcatagagcagttaggaaacactctgtttgtaaagtatgcaagtggatattcagacctctttgaggccttcgttggaaacgggatttcttcatattatgctagacagaagaattctcagtaacttccttgtgttgtgtgtattcaactcacagagttgaacgatcctttacacagagcagacttgaaacactctttttgtgaaatttgcaagtggagatttcagccgctttgaggtcaatggtagaaaagggaatatcttcgtatagaaactagacagaatgattctcagaaactcctttgtgatgtgtgcgttcgactcacagagttgaacctttcttttaatagagcagttgggaaacactctgtttgtaaagtctgcaagtggatattcagacttctttgaggccttcgttggaagcgggatttcttcatattctgctagacagaagaattctcagtaacttccttgtgttgtgtgtattcaactgacagagttgaacgatcctttacacagagcagacttgaaacactctttttggggaatttgcaagtggagatttcagccgctatggggtcaatggtagaataggaaatatcttcctatagaaactagacagaatgattctcagaaactcctttgtgatgtgtgcgttcaattcacagagtttaacttttcttttcatagagcagttaggaaacactctgtttgtaaagtctgcaagtgaatattcagacctctttgaggccttcgttggaaacgggatttcttcatattatgctagacagaagaattctcagtaacttccttgtgttgtgtgtattcaattcacagagttgaacgatcctttacagagagcaggcttgaaacactctttttgtggaatttgcaagtggagatttcatccgctttgaggtcaatggtagaataggaaatatcttcctatagaaacttgacagaatgattctcagaaactcctttgtgatgtgtgcgttcaactcacagagttcaacctttcttttcctagagcagttgggaaacactctgtttgtaaagtctgcaagtggatattcagacatccttgaggctttcgttggaaacgggatttcttcatattctgctatacagaagaattctcagaaacttcctggtgttgtgtgttttcaactcacagagttcaacgatcctttacacagagtagacttgaaacactcttttcgtggaattggcaagtggagatttcagccgctttgaggtcaatggtagaaaaggaaatatcttcgtataaaaactagacagaatgattctcagaaactcctttgtgatgtgtgcgttcaactcacagagtttaacctttcttttcatagagcagttaggaaacactctgtttgtaaactctgcaagtggatatacagacctctttgaggccttcgttggaaacgggatttcttcatactatgctagacagaagaattctcagtaacttccttgtgttgtgtgtattcaactcacagagttgaacgatcctttacacagagcagacttgatacattctttttgtggaatttgcaagtggagatttcagccgctttgaggtcaatggtagaataggaaatatcttcctatagaaactagacagaatgattctcagaaactcctttgtgatgtgtgcgttcaactcacagagtttaacctttcttttcatagagcagttagggaacactctgtttgtaaagtctgcaagtggatattcagacctctttgaggccttcgtaggaaacgggatttcttcatattatgctagacagaagaattctcagtaacttccttgtgttgtgtgtattcaactcacagagttgaacgatcctttacagagagcagacttgaaacactctttttgtggaatttgcaagtggagatttcagccgctttgaggtcaattgtagaaaaggaaatatcttcgtataaagactagacagaatgattctcagaaacttcattgtgatgtgtgcgttcaactcacggagtttaacctttcttttcatagagcagttaggaaacactctgtttgtaaactctgcaagtggatattcagacctctttgaggccttcgttggaaacgggatttcttcatactatgctagacagaagaattctcagtaacttccttgtgttgtgtgtattcaactcacagagttgaacgatcctttacacagagcagacttgaaacactctttttgtggaatttgcaaatggagatttcaagcgctttgaggccaaaggcagaaaaggaaatatcttcgtataaaaactagacagaatgattctcagaaactcctttgtgatgtgtgcgttcaactcacagagtttaacctttcttttcatagagcagttagcaaacactctgtttgtaaagtctgcaagtggatattcagacctctttgaggccttcgttggaaacgggatttcttcatattatgctagacagaagaattctcagtaacctccttgtgttgtgtgtattcaactcacagagttgaacgatggtttacacagagcagaattgaaacactctttttgtggaatttgcaagtggagatttcagccgctttgaggacaatggtagaaaaggaaatatcttcgtataaaaactagacagaatgattctcagaaactcctttgtgatgtgtgcgttcaactcacagagtttaacctttctgttcatagagcaattgggaaacactctgtttgtaaagtctgcaagtggatattcagacctctttgaggccttcgttggaaacgggatttcttcatattctgctagacagaagaattctcagtaacttccttgtgttgtgtgtattcaactcacagagttgaatgatcctttacacagaacagacttgaaacactctttttgtggaatttgcaagtggagatttcagccgctttgaggtcgacggtagaataggaaatatcttcctatagaaactagacagaatgattctcagaaacttcattgtgatttgtgcgttcaactcacagaactttaacctttcttttcatagagcagttaggaaacactctgtttgtaaagtctgcaagtggatattcagacctctttgaggccctcgttggaaactggtttttttcatgtaaggctagacagtagaattctcagaaacttccttgtgttgtgtgttttcaactcccagagttgaacgatgccttacacagagtagacttgaaaaactctttttgtggaatttgcaagtggagatttcaggcgctttgaggtcaatagtagaaaaggaaatatcttcgtataaaaactagacagaatgattctcagaaactcctttgtgatgtgtgtgttcaactcacagagtttaacctttcttttcatagagcagttaggaaacactctgtttgtaaagtctgcaagtggatattcagacctcttcgaggccttcgttggaaacgggtttttttcatataaggctagacagaagaattctcagtaacttccttgtgttgtgtgtattcaactcacagagttgaacgatcctttacacagagcatacttgaaacactcttcttgtggaatttgcaagtggagatttcagccgctttgaggtccatggtagaataggaaatatcttcctatagaaactagacagaatgattctcagaaactcctttgtgatgtgtgcgttcaactcacacagtttaacctttcttttcatagagcagttaggaaacactctgtttgtaaagtctgcaagtggatattcagacctccttgaggtcttcgttggaaacgggatttcttcatattttgctagacagaagaattctcagaaacttccttgtgttgtgtgttttcaactcacagagttcaacgatgctttacacagagtagacttgacacactctttttgtggaatttgcaagaggagatttcagccgctttgaggtcaatggtagaaaaggaaatatcttcgtataaaaactagacagaatgattctcagaaactcctttgtgatgtgtgcgttcaactcacagagttcaacctttcttttcatagagcagttgggaaacactctgtttgtaaagtctgcaagtggatattcagacttctttgaggccttcggtggaagcgggatttcttcatattctgctagacagaagaattctcagtaacttccttgtgttgtgtgtatgcaactcacagagttgaacgatcctttacacagagcagacttgtaacactctttttgtggaatttgcaagtggagatttcagccgctttgaagtcaaaggtagaaaaggaaatatcttcctataaaaactagacagaatgattctcatgaactcctttgtgatgtgtgcgttcaactcacagagtttaacctttcttttcatagagcagttaggaaacactctgtttgtaaagtctgcaagtggatattcagacctccttgaggccttcgttggaaacggtatttcttcatattctgctagacagaagaattctcagtagcttccttgtgttgtgtttattcaactcacagagttgaatgatcctttacacagagcagacttgaaacactctttttgtggaatttgcaagtggagatttcagccgctttgaggtcaatggtagaaaagtaaatatcttcgtataaagactagacagaatgattctcagaaacttcattgtgatgtgtgcgttcaactcacagagtttatcctttcttttcatagagcagttaggaaacactctgtttgtaaactctgcaagtggatattcagacctctttgaggccttcgttggaaacgggatttcttcatactgtgctagacagaagaattctcagtaacttccttgtgttgtgtgtattcaactcacagagttgaacgatcctttacacagagcggacttgaaacactcgttttgtggaatttgcaagtggagatttcagccgtgttgagataaatggtagaaaaggaaatatcttcgtataaaaactagacagaatgattctcagaaactcttttgtgatgtgtgcgttcaactcacagagtttaacctttcttttcatagagcagttaggaaacactctgtttgtaaagtctgcaagtggatattcagacctccttgaggccttcgttggaaacgggatttcttcatattctgctagacagaagaattctcagtaacttccttgtgttgtgtgtattcaactcacagagttgaacgaccctttacacagagcggacttgaaacactctttttgtggaatttgcaagtggagatttcagccgcgttgaggtcaatggtagaaaaggaaatatcttcgtacaaaaactagacagaatcattcccacaaactgcattgtgatgtgttcgttcaactcacagagtttaacctttcttttcatagagcagttaggaaacagtctgtttgaaaattctgtaagtggatattctgacatcttgtggccttcgttggaaacgggatttcttcatattctgctagacagaagaattctcagaatcttccttgtgttgtgtgtattcaactcacagagttgaacgatggtttacacagagcagatttgaaacactcatttggtggaatttgcaagtggagatttcagccgctttgaggtcaatggtagaaaaggaaataccttcgtataacaactagacagaatgattctcataaacttctttgtgatgtgtgcattcaactcacagagtttcacctttcttttcatagagcagttaggaaacactctgtttgtaaagtctgcaagtggatattcagacctccttgaggtcttcgttggaaacgggatttcttcatattctgctagatagaagaattctcagtaacttcccttgtgttgtgtgtattcaactcacggagttgaacgatcgtttacacagagcagacttgaaacactctttttgtggaatttgcaagtggagatttcagccgcgttgaggtcaatggtagaaaaggaaatatcttcgtataaaaactagacagaatgattctgagaaactcctttgtgatgtgtgcgttgaactcacagagtttatcttttcttttcatagagcagttaggaaacactctgtttgtaaagtctgcaagtggatattcagacctccttgaggccttcgttggaaacgggatttcttcatattatgctagacagaataattctcagtaacttccttgtgttgtgtgtattcaactcacagagttgaacgatcctttacacagagcagacttgaaacaatctttttgtggaatttgcaagtggagatttcagccgctttgaggtcaatggtagaataggaaatatcttcctatagaaactagacagaatgattctcagaaactcctttgtgatgtgtgcgttcaactcacagagttcaacctttcttttcatagagcagttgggaaacactctgtttgtaaagtctgcaagtggatattcagacttctttgaggccttcgttggaagcgggatttcttcaaattctgctagacagaagaattctcagaaacttccttgtgttgtgtgtattcaactcacagagttgaacgatcgtttacacagagcagacttgaaacactctttttgtggaatttgcaagtggagatttcagccgctttgaggtcaatggtagaataggaaatatcttcctatagaaactagacagaatgattctcagaaactcctttgtgatgtgtgcgttcaactcacagagtttaacctttcttttcatagagcagttaggaaacactctgtttgtaaagtctgcaagtggatattcagacctccttgaggccttctttggaaacaggatttcttcatattctgctagaaagaagaattctcagtaacttccttgtgttgtgtgtattcaactcacagagctgaacgatcctttacacagagcagacttgtaacactctttttgtggaatttgcaagtggagatttcagccgctttgaagtcaaaggtagaaaaggaaatatcttcctataaaaactagacagaatgattctcagaaactcatttgtgatgtgtgtgttcaactcacagagtttaacctttcttttcatagagcagttagtaaacactctgtttataaagtctgcaagtggatattcagacccctttgaggccttcgttggaaacggcatttcttcatattatgctagacagaagaattctcagaaacttcccttgtgttgtgtttattcaactcacagagtcgaacgatcctttactcagagcagacttgaaacactccatttgtggaatttgcaagtggagatttcagccgctttgaggtcaatggtagaataggaaatatcttcctatggaaactagacagaatgattctaagaaactcctttgagatgtgtgcgttcaactcacagagtttaacctttcttttcatagagcagttaggaaacactctgtttgtaaagtctgcaagtggatattcagacctctttgaggccttccttggaaacgggatttcttcatattatgctagacagaagaattctcagtaacttccttgtgttgtgtgtattcaactgacagagttgaactttcatttagagagagcagatttgaaacactgtttttgtggaatttgcaagtggagatttcaagcgctttggggccaaaggcagaaaaggaaataccttcgtataaaaactagacagaatcattctcagcaaactgctctgtgatgtgtgcgttcaactctcagagtttaacttttcttttcattcagcagtttggaaacactctgtttgtaaagtctgcacgtggataatttgaccacttagaggccttcgttggaaacgggtttttttcatgtaaggctagacagaagaattcccagtaacttccttgtgttgcgtgcattcaactcacagagttgaactttcccttagacagagcagatttgaaacactctatttgtgcaatttgcaagtgtagatttcaagcgctttaaggtcaatggcagaaaaggaaatatcttcgtttcaaaactagacagaatcattcccacaaactgcgttgtgatgtgttcgttcaactcacagagtttaacctttctgttcatagagcagttaggaaacactctgtttgtaaagtctgcaagtggatattcagacctccttgaggccttcgttggaaacgggatttcttcattttctgctagacagaagaattctcagtaacttccttgtgttgtgtgtattcaactcacagagttgaaggatcctttacagagagcaggcttgaaacactctttttgtcgaatttgcaagtggagatttcagccgctttgaggtcaatagtagaaaaggaaatatcttcgtagaaaaactagacagaatgattctcagaaactcctttgtgatgtgtgcgttcaactcacagagtttaaactttcttttcatagagcagttgggaaacactctgtttgtaaagtctgcaagtggatattcagacatccttgaggctttcgttggaaacgggatttcttcatattctgctagaaagaagagttcccactaacttccatgtgttgtgtgtgttcaactcacagagttgaactttcatttacacagagcagatttgaaacactctttttgtggaatttgcaaatggagatttcaagcggtttgaggccaaaggcagaaaaggaaatatcttcgtataaaaactagacagaatcattctgagaaactgctctgcgatgtgtgcgttcaactctcagagtttaacttttcttttcattcagcagtttggaaacactctgtttgtaaagtctgcacgtggataatttgaccacttagaggccttcgttggaaacgggtttttttcatgtaaggctagacagaagaattctcagtaacttccttgtgttgtgtgtattcaactcacacagttgaacgatcctttacacagagcagacttgtaacactctttttgtggaatttgaaagtggagatttcagccgctttgaagtcaaaggtagaaaaggaaatatcttcctataaaaactagacagaatgattctcagaaactcctttgtgatgtgtgcgttcaactcacagagtttaacctttcttttcatagagcagttaggaaacactctgtttgtaaagtctgcaagtggatattcagacctctttgaggccttcgttggaaacgggtttttttcatataaggcttgacagaagaattctcagtaacttccttgtgttgtgtgtattcaagtgacagagttgaacgatcctttacacagagcagacttgaaacactctttttgtggaatttgcaaggggagatttcaagcgctttggggccaaaggcagaaaaggaaatatcttcgtataaaaactagacagaatcattctcagaaactgctctgcgatgtgtgcgttcaactctcagggtttaacttttcttttcattcagcagtttggaagcactctgtttgtaaagtctgcaagtggatattttgacctctttgaggccttcgttggaaacgggtttttttcatgtaagtctagacagaagaattcccagtaacttccttgtgttgtgtgcattcaactcacagagttgaacgttcccttagacacagcagatttgaaacactctatttgtgcaatgtgcaagtgtagatttcaagcgctttaaggtcaatggcagaaaaggaaatatcttcgtttcaaaactagacagaatcattcccacaaactgcgttgtgatgtgttcgttcaactcacagagttttacctttctgttcatagagcagttaggaaacactctgtttgtaaagtctgtaagtggatattctgacatccttgtggccttcgttggaaaagggatttcttcatattctgctagacagaagaattctcagtaacttccttgtgttgtgtgtattcaactcacagagttgaacgatcctttacacagagcagacttgaaacgttctttttgtggaatttgcaagtggagatttcagccgctttgaggtcaatcgtagaataggaaatatcttcctatagaaactagacagaatgattctcagaaactcctttgtgatgtgtgcgttcaactcacagagtttaacctttcttttcatagagcagttaggaaacactctgtttgtaaagtctgcaagtggatattcagacatccttgaggctttcgttggaaacgggatttattcatattctgctagacagaagaattctcagtaacttccttgtgttgtgtgtgttcaactcacagagttgaactttcatttacacagagcagatttgaaacactctttttgtggaatttgcaagtggagatttcagccgctttgaagtcaaatgtagaaaaggaaatatcttcctataaaaactagacagaatgattctcagaaactcctttgtgatgtgtgcgttgaactcacagagtttaaccttccttttcatagagcagttaggaaacactctgtttgtaaagtctgcaagtggatattcagacctctttgaggccttcgttggaaacgggtttttttcatataaggctagacagaagaattcccagtaacttccttgtgttgtgtgtgttcaactcacagagttgaactttcatttacagagagcagatttgaaacactctttttgtggaatttgcaagtggagatttcaagcgctttgaggccaacggcagaaaaggaaatatcttcgtataaaaactagacagaatgattctcagaaacttctttgtgatgtgtgcgttcaactcacagagtttaacctttcttttcatagagcagttaggaaacactctgtttgtaaactctgcaagtggatagtcagacctctttgaggccttcgttggaaacgggatttcttcatactatgctagacagaagaattctcattaacttccttgtgttgtgtgtattcaactcacagagttgaacgatcctttacacagagcggacttgaaacacactttttgtggaatttgcaagtggagatttcagccgcgttgaggtcaatggtagaaaaggaaatatcttcgtataaaaactagacagaatgattctcagaaaatcctttgtgatgtgtgcgttcaactcacagagtttaacttttcctttcatagagcagttaggaaacactctgtttgtaaagtctgcaagtggatattcagacctctttgaggccttcgttggaaacgggatttcttcatattatgctagacagaagaattctcagaaacttccttgtgttgtgtgtattcaactcacagagttgaacgatcctttacacagagcagacttctaacacactttttgtggaatttgcaagtggagatttcagccgctttgaggtcaatggtagaaaaggaaatatcttcgtataaaaactagacagaatgattctcagaaactcctttgtgatgtgtgcgttgaactcacagagtttaacttttcttttcattcagcagtttggatacactctgtttgtaaagtctgcacgtggatattttgagcacttagaggccttcgttggaaacgggtttttttcatgtaaggctaggcagaagaattcccagtaacttccttgtgttgtgtgaattcaactcacagtgttgaacgttcccttagacagagcatatttgaaacactctatttgtgcaatttgcaagtgtagatttcaagcgctttaaggtcaatggcagaaaaggaaatatcttcgtttcaaaactagacagaatcattcccacaaactgcgttgtgatgtgttcgttcaactcacagagtttaacctttctgttcatagagcatttaggaaacactctgtttgtaaagtctgtaagtggatattctgacatcttgtggccttcgttggaaacgggatttcttcatattctgctagacagaagaattctcagtaactttccttgtgttgtgtgtattcaactcacagagttgaacgatcctttacacagagcagacttgaaacactctttttgtggaatttgcaagtggagatttcagccgcgttgaggtcaatgttagaaaaggaaatatcttcgtataaaaactagacagaatgattctcagaaactcctttgtgatgtgtgcgttcaactcacagagtttaacctttcttttcatagagcagttaggaaacactctgtttgtaaactctgcaagtggatattcagacctctttgaggccttcgttggaaacgggatttctccatactgtgctagacagaagaattctcagtaacttccttgtgttgtgtgtattcaactcacagagttgaacgatcctttacacagagcagacttgaaacactctttttgtggaatttgcaggtggagatttcagccgctttgaggtcaatggtagaaaaggaaatatcttcgtataaagactagacagaatgattctcagaaactcctttgtgatgtgtgcgttcagctcacagagtttaacgtttcttttcatagagcagttaggaaacactctgtttgtaaagtctgcaagtggatattcagacctctttgaggccttcgttggaaacgggtttttttcatataaggctagacagaagaattcccagtaacttcccttgtgttgtgtgtgttcaacacacagagttgaactttcatttacacagagcagatttgaaacactctttttgtggaatttgcaagtggagatttcaagcgctttgaggccaaaggcagaaaaggaaatatcttcgtttcaaaactagacagaatcattctcagaaactgctgcgtgatgtgtgcgttcaactctcagactttaacttttcttttcattcagcggtttggaaacactctttttgtaaagtctgcacgtggatattttgaccacttagaggccttcgttggaaacgggtttttttcatgtaaggctagacagaagaattcccagtaacttccttgtgttgtgtgcattcaactcaccaatttgaacgttcccttagacagagcagatttgaaacactctatttgtgcaatttgcaattgtagatttcaagccctttaaggtcaacggcagaaaaggaaatatcttcgtttcaaaactagacagaatcattcccacaaactgcgttgtgatgtgttcgtttaactcacagagtttaacctttcttttcatagagcagttaggaaacagtctgtttgtaaattctgtaagtggatattctgacatcttgtggccttcgttggaaacgggatttcttcatattctgctagacagaagaattctcagaaacttcgttgtgttgtgtgttttcaactcacagagttcaacgatcctttacacagagtagacttgaaacactctttttgtggaattggcagggtggagatttcagccgctttgaggtcaatggtagaaaaggagatatcttcgtataaaaactagacagaatgattctcagaaactcctttgtgatgtgtgctttcaacgcacagagtttaacctttcttttcatagagcagttaggaaacactctgttggtaaagtctgcaagtggatattcagacctccttgaggccttcgttggaaacgggatttcttcctattatgctagacagaagaattctgagtatcttccttgtgttgtgtgtattcaactcacagagttgaacgatcctttacacagagcagacttgaaacactctttttgtggaatttgcaagtggagatttcagccgctttgaggtcaatggtagaaaagggaatatcttcgtatagaaactagacagaattattctcagaaactcctttgtgatgtgtgcgttcaactcacagagtttaacctttcttttcatagagcagttaggaaacactctgtttgtaaagtctgcaagtggatattcagacatctttgaggctttcgttggaaacgggatttcttcatattctgctagacagaagaattcccagtaacttccttgtgttgtgtgtgttcaactcacagagttgaactttcatttacacagagcagatttgaaacactctttttgttgaatttgcaagtggagatttcaagcggtttgaggccaaaggtagaaaaggaaatatcttcgtttcaaaactagacagaatcattctcagaaactgctctgcgatgtgtgcgttgaactctcagagtttaacttttcttttcattcagcagtttggaaacactctgtttgtaaagtctgcacgtggatattttgaccacttagaggccttcgttggaaacgggtttttttcctataaggctagacagaagaattcccagtaacttccttgtgttgtgtgcattcaactcacagagatgaacgttcccttagacagagcagatttgaaacactctatttgtgcaatttgcaagtgtagatttcaagcgctttaaggtcaaaggcagaaaagaaaatatcttcgtttcaaaactagacagaatcattcccacaaactgcgttgtgatgtgttcgttgaactcacagagtttaacctttctgttcatagagcagttaggaaacactctgtttgtaaagtctgtaagtggatattctgacctcttgtggccttcgttggaaacgggatttcttcatattctgctagacagaagaattctcagtaacttccttgtgttgtgtgtattcaactcacagagttgaacgatcccttacacagagcagacttgaaacactctttttgtggaatttgcaagtggagatttcagccgctttgaggtcaatggtagaaaaggaattatcttcgtataaagactagacagaatgattctcagaaacttctttgtgatgtgtgcgttcaactcacagagtttaacctttcttttcatagagcagttaggaaacactctgtatgtaaactctgcaagtggatattcagacctgtttgaggccttcgttggaaacgggatttcttcatactatgctagacagaagaattctcagtaacttccttgtgttgtgtgtattcaactcacagagttgaacgatcctttacacagagcagacttgaaacactctttttgtggagtttgcaattggcgatttcagccgctttgaggtcaatggtagaataggaaatatcttcctatagaaactagacagaatgattctcagaaactcctttgtgatgtgtgcgttcaactcacaaagtttaacctttcttttcatagagcaattaggaaacactctgtttttaaagtctgcaagtggatattcagacctcttagcggccttcgttggaaacgggatttcttcatattatgctagacaaaagaattctcagtaacttccttgtgttgtgtgtattcaactgacagagttgaactttcatttagagagagcagttttgtaacactgtttttgtggaatttgcaagtggagatttcaagcgctttggggccaaaggcagaaaaggaaatatcttcgaataaaaactagacagaatcattctcagaaactgctctgcgatgtgtgcgttcaactctcagagtttaacttttcttttcattcagcagtttggaaacactctgtttgtaaagtctgcacgtggataatttgactacttagaggccttcgttggaaacgggtttttttcatgtaaggctagacagaagaattctcagtaacttccttgagttgtgtgtattcaactcacagagttgcacgatcctttacacagagcagacttgtaacactctttttgtggaatttgcaagtggagatttcagccgctttgaagtcaaaggtagaaaaggaaatatcttcctataacaactagacagaatcattcccacaaactgcgttgtgatgtgttcgttcatctcacagagtttaacctttcttttcatagagcagttaggaaacactctgtttgtaaattctgtgagtggatattctgacatcttgtggccttcgttggaaacgggatttcttcatattctgctagacagaagtattctcagtaacttccttgtgatgtgtgtattcaactcacagagttgaacgatcctttacacagagcagacttgaaacactctttttgtggaatttgcaagtggagatttcagccgctttgagttcaatggtagaataggaaatatcttcctatagaaactagacagaatgattctcagaaactcctttgtgatgtgtgtgttcaactcacagagtttaacctttcttttcatagagcagttagtaaacagtctgtttataaagtctgcaagtggatattcagacccctttgaggccttcgttggaaacgggatttctacatattatgctagacagaagaattctcagtaacttcattgtgttgtgtgtattcaactcacagagttgaacgatcctttacacagagcagacttgaaacactctttttctggaatttgcaagtggagatttcagccgctttgaggtcaatggtagaataggaaatatcttcctatagaaactagacagaatgattctcagaaactcctttgtcatgtgtgcgttcaactcacagagtttaacctttcttttcatagagcagttaggaaacactctgtttctaaagtctgcaagtggatattcagacctctttgaggccttcgttggaaacgggtttttttcatataaggctagagagaagaattcccagtaacttccttgtgttgtgtgtgttcaactcacagagttgaactttcatttacacagagcagatttgaaacactctttttgtggaatttgcaagtggagatttcaagcgctttgaggccaaaggcagaaaaggaaatatcttcgtgtaaaaactagacagaatcattctcagaaactgctctgcgatgtgtgtgttcaactctcagagtttaacttttcttttcattcagcagtttggaagcactctgtttgtaaagtctgcacgtggataatttgaccacttagaggccttcgttggaaacgggtttttttcctgtaaggctagacagaagaattcccagtaacttccttgtgttgtgtacattcaactcacagagttgaacgttcccttagacagagcagatttgaaacactccttttgtgcaattggcaagtggagatttcaagcgctttaaggtcaatggcagaaaaggaaatatcttcgtttcaaaactagacagaatcattcccacaaactgcgttgtgaggtgttcgttcaactcacagagtttaacctttcttttcatagagcagttaggaaacagtctgtttgtaaattctgtaagaggatattctgacatcttgtggccttcgttggaaacgggatttcttcatattctgctagacagaagaattctcagtaacttccttgtgttgtgtgtattcaactcacagagttgaatgatcctttacacagaacagtcttgaaacactctttttgtggaatttgcaagtggagatttcagccgctttgaggtcaatggtagaataggaaatatcttcctatagaaactaggcagaatgattctcagaaacttctttgtgatgtgtgtgttcaactcacacagtttaacctttcttttcatagagcagttaggaaacactgtgtttttaaactctgcaagtggatattcagacctctttgaggccttcgttagaaacgggtttcttcatactgtgctagacagaagaattctcagtaacttccttgtgttgtgtgtattcaactcacagagttgaacgatcctttacacagagcagacttgtaacactctttttgtggaatttgcaagtggagatttcagccgctttgaagtgaaaggtagaaaaggaaatatcttcctataaaaactagacagaatgattctcagaaactcctttgtgatgtgtgcgttcaactcacagagtttaacgtttcttttcatagagcagttaggaaacactctgtttgtaaagtctgcaagtggatattcagacctctttgaggccttcgtaggaaacgggtttttttcatataaggctagacagaagaattcccagtaacttccttgtgttgtgtgtgttcaactcacagagttgaactttgatttacacaggagcagatttgaaacactctttttgtggaatttgcaagtggagatttcaagcgctttgaggccaaaggcagaaaaggaaatatcttcgtataaaaactagacagcatcattctcagaaactgctctgcgatgtgtgcgttcaactctcagagtttaacttttcttttcattcagcagtttggaaacactctgtttgtaaagtctgcacgtggatattttgaccacttagaagccttcgttggaaatgggtttttttcctgtaaggctagacagaagaattcccagtaacttccttgtgttgtgtgcattccactcacagagttgaacgttcccttagacagagcagatttgaaacactctatttgtgtaatttgcaagtgtagatttcaagcgctttaaggtcaacggcagaaaaggaaatatcttcgtttcaaaactagacagaatgattcccacaaactgcgttgtgatgtgttcgtacaactcacagagtttaacctttctgttcatagagcagttaggaaacactctgtttgtaaagtctgtaagtggatattcagacatcttgtggccttcgttggaaacgggatttcttcatattctgctagacagaagaattctcagaatcttccttgtgttgtttgtattcaactcacacagttgaacgatcctttacacagagcagatttgaaacactcatttggtggaatttgtaagtggaggtttcagccgctttgaggtccatggtagaaaaggaaatatcttcgtataacaactagacagaatgattctcaaaaacttctttgtgatgtgtgcgttcaactaacagagtttaacctttcttttcatagagcagttaggaaacactctgtttgtaaactctgcaagtggatattcagacctctttgaggccttcgttggaaacgggatttcttcatactgtgctagacagaagaattctcagtaacttctttgtgttgtgtgtattcaactcacagagttgaacgatcctttacacagagcagacttgaaacactctttttgtggaatttgcatgtggagatttcagccgctttgaggtcaatggtagaataggaaatatcttcctatagaaactagacagaatgattctcagaaactcctttgtgatgtgtgcgttcaactcacagagttcaacctttcttttcatagagcagttgggaaacactctgtttgtaaagtctgcaagtggatattcagagttctttgaggccttcgttggaagcgggatttcttcatattctgctagacagaagaattctcagtaactcccttgtgttgtgtgtattcaactcacagagttgaacgatcctttacacagagcagacttgtaacactctttttgtggaatttgcaagtggagatttcagccactttgaagtcaaaggtagaaaaggaaataacttcctataaaaactagacagaatgattctcagaaactcctttgttatgtgtgcgttcaactcacagagtttaacctttcttttcatagagcagttaggaaacactctgtttgtaaagtctgcaagtggatattcagacctccttgaggccttcgttggaagcgggatttcttcatgttcagctagacagaagaattctcagtaactttccttgtgttgtgtgtattcaactcacagagttgaacgatcctttacacagagcagacttgaaacactctttttgtggaatttgcaagtggagatttcagccgctttgaggtcaaaggtagaaaaggaaactatgttcgtataaagagtagacagaatgattctcagaaactcctttgtgatatgtgcgttcaactcacagagtttaacctttattttcatagagcagttaggaaacactctgtttgtaaagtctgcaaggggatattcagacctctttgaggctttcgttggaaacgggatttcttcatattctgctagacagaagaattctcagtaacttccttgtgtagtgtgcattcaactcacagagttcaacgatcctttacacagagctgattagaaacactttttttgttgaatttgcaagtggagatttcagccgctttgaggtcaatggtagaaaaggaaatatcttcgtataaaaactagacagaatgattctcagaaactcctttgtgatgtgtacgttcaactcacagagtttaacctttcttttcttagagcagttaggaaacactctgtttgtaatgtctgcaagtggatattcagacctctttgaggccttcgttggaaacgggtttttttcatataaggctagacagaagaattctcagaaacttccttgtgttgtgtgttttcaactcacagagttgaacgatcctttacacagagcagacttgaaacacttcttttgtggaatttgcaagtggagatttcatccgctttgaggtcaatggtagaataggaaatatcttcctatagaaagtagacagaatgattctcagaaactcctttgtgctgtgtgcgttcagctcacagagtttaacctttcttttcatagagcagttaggaaacactctgtttgtaaagtctgcaagtggatattcagacctctttgaggccttcgttggaaacgggatttcttcatattctgctagacagaagaattctcagaatcttccttgtgttgtgtgtattcaactcacagagttgaaagaccctttacacagagcggacttgaaacactctttttgtggaatttgcaagtggagatttcagccgcgttgaggtcaatggtagaaaaggaaatatcttcgtataaaaactagacagaatgattctcagaaactcctttgtgatgtgtgcgttcaactcacagagtttaacctttcttttcatagagcagttaggaaacactctgtttgtaaagtctgcaagtggatattcagacctctttgaggccttcgttggaaacgggatttcctcatattatgctagacagaagaattctcagtaacttccttgtgttgtgtgtattcaactcacagagttcaatgatcctttacacagaacagacttgaaacactcttgttgtggaatttgcaagtggagaattcagccgctttgaggtcaacggtagaaaaggaaatatcttcctatagaaactagacagaatgattctcagaaactcctttgtgatgtgtgcgttcaactcacagagtttagcctttcttttcatagagcagttaggaaacactctgtttgtaaagtctgcaagtggatattcagacctctttgaggccttcgttggaaacgggatttcttcatattctgctagacagaagaattctcagtaacttccttgtgttgtgtgtattcaactcacagagttgaacgatcctttacacagagcggacttgaaacactctttttgtggaatttgcaagtggagatttcagccgcattgaggtcaatggtagaaaaggaaatctcttcgtataaaaactagacagaatgattgtcagaaactcctttgtgatgtgtgcgttcaactcacagagtttaacctttcttttcatagagcagttaggaaacactctgtttgtaaagtctgcaagtggatattcagacatctttgaggctttcgttggaaacgggatttcatcatattctgctagacagaagaattctcagaaacttccttgtgttttgtgttttcaactcacggagttgaacgatgctttacacagagtagacttgaaacactctttttgtggaatttgcaattggagatttcagccgctttgaggtcaatggtagaaaaggaaatatcttcgtataaaaactagacagaatgattctcagaaacttctttgtgatgtgtgcgttcaactcacagagtttaacctttcttttcatagagcagttaggaaacactctgtttctaaactctgcaagtggatattcagacctccttgaggccttcgttggaaacgggatttcttcatactatggtagacagaagaattctcagaatcttccttgtgttgtgtgtattcaactcacagagttgaacgatcctttacacagagcagacttgaaacactctttttgtggaatttgcaagtggagatttcagccgctttgaggtcaatggcagaaaaggaaatatcttcgtatgaaaactagacagaatgattctcagaaactcctttgtgatgtgtgcgttcaactcacagagtttaaccttacttttcatagagcagttaggaaacactctgtttgtaaagtctgcaagtggatattcagacctctttgaggccttcgttggaaacgggatttcttcatattctgctagacagaagaattctcagtaacttccttgtgttgtgtgtattcaactcacagagttgaacgatcctttacacagagcagacttgaaacactccttttgtggaatttgcaagtggagatttcagccgctttgaggtcaatagtagaaaaggaaatatcttcgtagaaaaactagacagaatgattctcagaaactcctttgtgatgtgtgcgttcaactcacagagtttaacttttcttttcatagagcagttaggaaacattctgtttgtaaagtctgcaagtggatattcagacctctttgtggccttcgttggaaacgggatttcttcatattctgctagacagaagaattctcagtaacttccttgtgttgtgtgtattcaactgacagagttgaactttcatttagagagagcagatttgaaacactgtttttgtggaatttgcaagtggagatttcaagctctttggggccaaaggcagaaaaggaaatatcttcgtagaaaaactagacagaatcattctcagaaactgctctgcgatgtgtgcgttcaactctcagagtttaacttttcttttcattcagcagtttggaaacactctgtttgtaaagtctgcacgtggataatttgaccaccgagagaccttcgttggaaacgggtttttttcatgtaaggctagacagaagaattcccagtaacttccttgtgttgtgtgcattcaactcacagagttgaacgttcccttagacagagcagatttgaaacactctatttgtgcaatttgcaagtgtagatttcaagatctttaaggtcaacggcagaaaaggaaatatcttcgtttcaaaactagacagaatgattctcataaactcctttgtgatgtgtgcgtttaactcacagagtttaacttttcttttcatagagcagttaggaaacactctgtttgtaaagtctataagtggatattctgacatcttgtggccttcgttggaaacgggatttcttcatattctgctagacagaataattctcagtaaattccttgtgttgtgtgtattcaagtcacagagttgaacgatcctttacagagagcagacttgaaacactctttttgtggaatttgcaagtggagatttcagccgctttgaggtcaatagtcgaaaaggaaatatcttcgtagaaaaactagaaagaatgattctcagaaaatcttttgtgatgtgtgcgttcaactcacagagttttacttttcttctcatagagcagttaggaaacactctgtttgtaaagtctgcaagtggatattcagacctctttgaggccttcgttggaaacgggatttcttcatattatgctagacagaataattctcagtaacttccttgtgttgtgtttattcaactcacagagttgaatgatcctttacacagagcagacttgaaacactctttttgtggaatttgcaagtggagatatcagccgctttgaagtcaatggtagaaaagtaaatatcttcgtataaagactagacagaatgattctcataaactcctttgtgatgtgtgcgttcaactcacagtagtttaacctttcttttcatagagcagttaggaaacactctgtttgtaaagtctgcatgtggatattcagacctctttgaggccttccttggaaacgggatttcttcatattctgctagacagaataattctcagtaacttccttgtgttgtgtgtattcaactcacagagttgaacgatcctttacagagagcagacttgaaaaactctttttgtgggatttgcaagtggagatttcagccgctttgagctcaatggtagaataggaaatatcttcctaaagaaactagacagaaagattctcagaaactcctttgtgatgtgtgcgttcaactcacagagtttaacctttcttttcatagagcagttaggaaacactctgtttgtaaagtctgcaagtggatattcagacctgtttgaggccttcgttggaaacgggtttttttcatataaggctagacagaagaattctcagtaacttccttctgttgtgtgtattcaactcacagaattgaacgatcctttacacagagcagacttgacacactctttttgtggaatgtgcaagtggagatttcagccgctttgaggtcaatggtagaaaaggaaaaatcttcgtatagaaacaagacagaatgattctcataaactcctttgtgatgtgtgcgttcaactcacagagtttaacctttcttttcatagagcagttaggaaacactctgtttgtaaagtctgcaagtggatattcagacctccttgagaccttcgttggaaacgggatttcttcatattctgctagacagaagaattctcagtaacttccttgtgttgtgtgtattgaactcgcagagttgaacgatcctttacacagagcagacttgaaacactctttttgtggaattttcaagtgcagatttcagccgctttgaggtcaatagtagaaaaggaaatatcttcgtagaaaaactagacagaatgattctcagaaactcctttatgatgtgtgcattcaactcacagaggttaacctttcttttcatagagcagttaggaaacactctttttgtaaagtctgcaagtggataatcagacctctttgaggccttcgttggaaacgggatttcttcatactatgctagacagaagaattctcagtaacttccctgtgttgtgtgtattcaactgacagagttgaactttcttttagagagagcagatttgaaacactgtttttgtggaatttgcaactggagatttcaagcgctttggcgccaaaggcagaaaaggaaatatcttcgtataaaaactagacagaatcattctcagaaactgctctgcgatgtgtgcgttcaactctcagagttaaacttttcttttcattcagcagtgtggaaacactctgtttgtaaagtctgcacgtggatattttgaccgcttagaggccttcgttggaaacggttttttttcatgtaaggctagacagaagaattcccagtaacttccttgtgttgtgtgcattcaactcacagagttgaacgttcccttagacagagcagatttgaaacactctatttgtgcaatttgcaagtgtagatttcaagcgcgttaaggtcaacggcagaaaaggaaatatcttcgtttcaaaactagacagaatcattcccacaaactgcgttgtgatgtgttcgttcaactcacagagtttaacctttctgttcatagagcagttaggaaacactctgtttgtaaagtctgtaagtggatattctgaaatcttgtggccttcgttttaaacgggatttcttcatattctgctagacagaagatttctcagtaacttccttgtgttgtgtgtattcaactcacagagttgaatgatcctttacacagaacagtcttgaaacactctttttgtggaatttgcaagtggagatttcagccgctttggggtcaatggtagaataggaaataccttcctatagaaactagacagaatgattctcagaaaatcttttgtgatgtgtgcgttcaactaacaaagtttaacttttcttctcatagagcagttacgaaacactctgtttgtaaagtctgcaagtgtatattcagacctctttgaggccttcgttggaaacgggatttcttcatattatgctagacagaataattctcagtaacttccttgtgttgtgtgtatttaactcacagagttgaaggatcctttacagagagcaggcttgaaacactctttttgtcgaatttgcaagtggagatttcagccgctttgaggtcaatggtagaataggaaatatgttcttatagaaactagacagaatgattctcagaaactcctttgtgatgtgtgcgttcaactcagagtttaacctttcttttcatagagcagttaggaaacactctgtttgtaaagtctgcaagtggatattcagacctctttgaggccttcgttggaaacgggatttcttcatattatgctagacagaagaattctcagtaacttccttgtgttgtgtttattcaactcacagagttgaatgatcctttacacagagcagacttgaaacactctttttttggaatttgcaagtggagatttcagccgctttgaagtcaatggtagaaaagtaaatatcttcgtataaagactagacagaatgattctcagaaacttctttgtgatgtgtgcgttcaactcacagagtttaacctttcttttcatagagcagttaggaaacactctgtttgtaaagtctgcaagtggatattcagtcctccttgaggccttcgttggaagcgggatttcttcatgttctgctagacagaagaattctcagtaacttccttgtgttgtgtgtattcaactctcagagttcaacgatcctttacacagagcagacttgaagcactctttttgtggaatttgcaagtggagattttagccgctttgaggtcaatggtagaataggaaatatcttcctatagaaactagacagaatgattctcagaaactcctttgtgatgtgtgcgttcaactcacagagtttaacttttcttttcatagagcagttaggaaacactctgtttgtaaagtctgcaagtggatattcagacctctttgaagccttcgttggaaacgggatttcttcatattctgctagacagaagaattcccagtaacttccttgtgttgtgtgtgttcaactcacagagttgaactttgatttacacagaacagatttgaaacactctttttgtggaatttgcaagtggagatttcaagcgctttgaggccaaaggcagaaaaggaaatatcttcgtataaaaactagacagaatcattctgagaaactgctctgtgatttgtgcgttcaactctcagagtttaacttttcttttcattcagcagtttggaaactctctctttgtaaagtctgcacgtgcatattttgaacacttagaggccttcgttggaaacgggtttttttcatgtaaggctagacagaagaattcccagtaacttccttgtgttgtgtgcattcaactcacagagatgaacgttcccttagacagagcagatttgaaacactctatttgtgcaatttgcaagtgtagatttcaagcgctttaaggtcaatgacagaaaaggaaatatcttcgtttcaaaactagacagaatcattcccacaaactgcgttttgatgtgttcgttcaactcacagaatttaacctttcttttcatagagcagttaggaaacactctgtttgtaaattctgtaagtggatattctgaaatcttgcagccttcgttggaaacgggctttcttcatattctgctagacagaagaattctcagtaacttccttgtgttgtgtgtattcaactcacagagttgaacgatcctttacacagagcagacttgaaacactctttttgtggaatttgcaagtggagatttcagccgctttgaggtcaatggtagaaatggaaatatcttcgtataaagactagacagaatgattctcagaaactcctttgtgatgcgtgcgttcaactcacagagtttaacctttcttttcatagagcagttaggaaacactctgtttgtaaagtctgcaattggatattcagacctctattaggccttcgttggaaacgggatttcttcatattctgctagacagaagaattctcagtaacttccttgtgttgcgtgttttcaaatcacagagctgaacgatcctttacaaagagcagacttgaaacactctttttgtggaatttgcaagtggagatttcagccgctttgaggtcaatagtagaataggaaatatcttcctatagaaactagacagaatgattctcagaaactcctttgtgatgtgtgcgttcaactcacagagtttaacttttcttttattagggcagttaggaaacactctgtttgtaaagtcttcaagtggatattcagacctctttgaggccttcgttggaaacgggatttcttcatattctgctagacagaagaattctcagtaacttccttgtgttgtgtgtattcaactcacagagttgaacgatcctttacagagagcagacttgaaaaactctttttgtggaatttgcaagtggagatttcagccgctttgaggtcaatggtagaataggaaatatcttcctatagaaactagacagaatgattctcagaaactcctttgtgatgtgtgcgttcaactcacatagttcaacctttcttttcatagagtagttgggaaacactctgtttgtaaagtctgcaagtggatattcagacttctttgaggccttcgttggaagcgggatttcttcatattctgctagacagaagaattctcagaaacttccttgtgttgtgtgttttcaactcacagagttgaacgaccctttacacagagcagaattgaaacactctctttgtggaatttgcaagtggagatttcagccgctttgaggtcaatggtagaaaaggaaatatcttcgtataaaaactagacagaatgattctcagaaactcctttgtgatgtgtgcgttcaactcacagagtttaacctttcttttcatagagcagttgggaaacactctgttcgtaaactctgcaagtggatattcagacctctttgaggccttcgttggaaacgggatttcttcatattctgctagacagaagaattctcagaaacttccttgtgttgtgtgtattcaactcacacagttgaacgatcctttacacagagcagacttgaaacactctttttgtggaatttgcaagtggagatttcagccgctttgaggtcaatggtagaataggaaatatcttcctatagaaactagacagaatgattctcagaaactcctttgtgatgtgtgcgttcaactcacagagtttaacctttcttttcatagagcagttaggaaacactctgtttataatgtctgcaagtggatattcagacctctttgaggccttcgttggaaacgggatttcttcatattatgctagacagaagaattctcagtaacttccttgtgttgtgtgtattcaacccacagagttgaacgatcctttacacagagcatacttggaacactcttcttgtggaatttgcaagtggagatttcagccgctttgagatcaatggtagaataggaaatatcttcgtataaaaactagacagaatgattctcagaaaatcctttgtgatgtgtgtgttcaactcacagcagtttaacctttcttttcatagagcagttagtaaacactctgtttataaagtctgcaagtggatattcagacacctttgaggacttcgttggaaatgggatttcttcatattatgctagacagaagaattctcagtaacttccttgtgttgtgtgtattcaactcacagacttgaacgatcctttacacagagcagacttgaaacactctttttgtggaatttgcaagtggagatttcagccgctttgaggtcaatggtagaaaaggtaactatcttcgtataaagactagacagaatgtttctcagaaactcctttgtgatgtgtgcgttcaactcacagagtttaacctttcttttcatagagtagttaggaaacactctgtttgtaaagtctgcaagtggatattgagacctctttgaggccttcgttggaaacgggatttcttcatattctgctagacagaagaattctcagtaacttccttgtgttgtgtgtattcaactcacagagttgaacgatcctttacacagagcagacttggaacactgtttttgtggaatttgcaagtggagatttcagccgcgttgaggtcaatggtagaaaaggaaatatcttcgtataaaaactagacagaatgattctcagaaactcctttgtgatgtgtgcgttcaactcacagagttgaagttttcttttcttagagcagttaggaaacactctgtttgtaaagtctgcaagtggatattcagacctctttgaggccttcgttggaaacggggtttcttcatattctgctagacagaagaattctcagtaacttccttgtgttgtgtgtattcaactcacagagttgaacgatcctttacacagagcagacttgaaacactctttttgtgggatttgcaagtggagatttcagccgctttgaggtcaatggtagaaaaggaaatatcttcgtataaagactagacagaatgattctcagaaactcctttgtgatgtgtgtgttcaactcacagagtttatcctttcttttcatagagcagttaggaaacactctgtttgtaaagtctgcaagtggatattcagacatccttggggctttcgttggaaacgggatttcttcatattctgctagaaagaagaattctcagtaacttccttgtgttgtgtgtattcaactcacagagttgaacgatcctttacacagagcagacttcaaacactctttttgtggaatttgcaagtggagatttcagccgctttgaggtcaatggtagaaaaggaaactatcttcatataaagactagacagaatgattctcagaaactcttttgtgatgtgtgcattcaactcacagagtttaacctttcttttcatagagcagttaggaaacactctgtttgtaaagtctgcaagtggatattcagacctctttgaggccttcgttggaaacgggatttcttcatattatgctagaaagaagaattctcagtaacttccttgtgttgtgtgtattcaactcacagagttgaacgatcctttacacagagcagacttgaaacactctttttgtggaatttgcaattggagatttcagcccctttgaggtcaatggtagaataggaaatatcttcctatagaaactagacagaatgattctcagaaactcctttgtgatgggtgtgttcaactcacagagtttaacctttcttttcatagagcagttagtaaacactctgtttataaattctgcatgtggatattcagatccctttgaggccttcgttggaaacgggatttcttcatattatgctagacagaagaattctcagaaacttccttgtgttgtgtgttttcaactcacagagttgaacgatcctttacacagagcagacttgaaacactctttttgtggaatttgcaagtggagatttcagccgctttgaggtcaatggtagaataggaaatatcttcgtataaaaactagacagaatgattctcagaaactcctttgtgatgtgtgcgttcaactcacagagtttaacctttctcttcatagagcagttaggaaacactctgtttgtaaagtctgcaagtggatattcagacctctttgaggccttcgttggaaacggtatttcttcatattctgctagacagaagaattctcagtaacttccttgtgttgtgtgtattcaactcacagagttgaatgatcctttacacagaacagacttgaatcactcttgttgtggaattttcaagtggagatttcagccgctttgtggtcaacggtagaataggtaatatcttcctatagaaactagacagaatgattctcagaaactcctttgtgatgtgtgcgttcaaatcacagagtttaacctttcttttcatagagcagttaggaaacactctgtttgtaaagtctgcaagtggatattcaaacccctttgaggccttcgttggaaacggtatttcttcatattctgctagacagaagaattctcagtaacttccttgtgttgtgtgtattcaactcacagagttgaacgatcctttacacagagcagaattgaaacactctttttgtggaatttgcaagtggagatttcagccgcgttgaggtcaatggtagaaaaggaaatatcttcgtataaaaactagacagaatgattctcagaaactcctttgtgatgtgtgcattcaactcacagagtttaacctttcttttcatagagcagttaggaaacactctgtttgtaaagtctgcaagtggatattcagacctctttgaggccttcgttggaaatgggatttcttcatattctgctagagagaagaattctcagtaacttcattgtgttgtgtgtattcaactcacagatttcaacgatcctttacacagagcagacttgaaacactctttttctggaatttgcaagtggagatttcagccgctttgaggtcaatggtaggataggaaatatcttcctatagaaactagacagaatgattctcagaaactcctttgtgatgtgtgcgttcaactcacagagtttaacctttcttttcatagagcagttaggaaacactctgtttgtgaagtctgcaagtggatattcagacctctttgaggccttcgttggaaacgggtttttttcatataaggctagacagaagaattctcagaaacttccttgtgttgtgtgtattcaactcacagagttgaacgatcctttacacagggcagacttgaaacactctttttgtggaatttgcaaatggaaatttcagccgctttgaggtcaatggtagaaaaggaaatatcttcgtataaaaactagacagaatgattctcagaaactactttgtgctgtgtgcgttcagctcacagagtttaacctttcttttcatagagcagttaggaaacactctgtttgtaaagtctgcaagtggatattcagacatctttgtggctttcgttggaaacgggatttcttcatattctgctagacagaagaattctcagaaacttccttgtgttgtgtgttttcaactcacagagttcaacgatccattacacagagtagacttgaaacactctttttgtggaattggcaagtggagatttcagccgctttgaggtcaatggtagaaaaggaaatatgcttcgtataaaaactagacagaacgattctcagaaactcctttgtgatgtgtgcgttcaactcacagagtttaacctttcttttcatagagcagttaggaaacactctgtttgtaaagtctgcaagtggatattcagacctctttgaggccttcattggaaacgggatttcttcctattctgctagacagaagaattctcagtaacttccttgtgttgtgtgtattcaactcacagagttggacgatcctttacacagagcagacttgaaacactctttttgtggaatttgcaagtggaggtttcagccgctttgaggtcagtagtagaaaaggaaatatcttcgtagaaaaactagacagaatgattctcagaaactcctttgtgatgtgtgcgttcagctcacagagtttaacctttcttttcatagagcagttaggaaacactctgtttgaaaagtctgcaagtggatattctgacctccttcagggcttcgttggaaatgggatttcttcatattatgatggacagaagaattctcagtaacttccttgtagtgtgtgtattcaactcacagagttaaacgatcctttacacagagcagacttgaaacactcttgttgtggaatttccaagtggagatttcagccgctttgaggtcaatggtagaataggaaatatcttcctatagaaactagacagaaggattctcagaaactcctttgtgatgtgtgcgttcatctcacaaagtttaacctttctttccatagagcagttaggaaacactctgtttgtaaagtctgcaagtagatattcagacctttttcaggccttcgttggaaacgggatttcttcatactctgctagacagaagaattctcagaaacttccttgtgttgtgtgttttcaactcacagagttgaacgatgctttacacagagtagacctgaaacactctttttgtgtaatttgcaagtggagatttcagccgctttgaggtcaatggtagaaaagggaatatcttcgtataaaaactagacagaatgattctcagaaactcctttgtgatgtgtgtgttcaactcacagagtttaacctttcttttcatagagcagttaggaaacactctgtttgtaatgtctgcacgtggatatttggacttctttgaggccttcgttggaaacgggtttttttcatttaaggctagacagaagaattctcagaaacttccttgtgttgtgtgtattcaactcacagagttgaacgatcctttacacagagcagacttgaaacactctttttgtggaatttgcaagtggagatttcagccgctttgagttcaatggtagaataggaaatatcttcctatagaagctagacagaatgattctcagaaacttctttgtgatgtgtgcgttcaactcacagagttcaacctttcttttcatagagcagttaggaaacactctgtttgtaaactctgcaagtggatattcagacctgtttgaggccttcgttggaaacgggatttcttcatactatgctagacagaagaattctcagtaacttccttgtgttgtgtgtattcaactcacagagttgaacgatcctttacacagagcagactagaaacattctttttgtggaatttgcaagaggagatttcagccgctttgaggtcaatggtagaataggaaatatcttcctatagaaactagacagaacgattctcagaaactcctttgtgatgtgtgcgttcaactcacagagtttaacctttcttttcatacagcagttaggaaacactctgtttgtaaagtctgcaagtggatattcagacctctttgaggccttcgttggaaacgggatttcttcctattctgctagacagaataattctcagtaacttccttgtgttgtgtgtattcaactcacagagttgaacgatcctttacacagagcagacttgaaactctctttttgtggaatttgcaagtggagatttcagccgctttgaggtcaatagtagaaaaggaaatatcttcgtagaaaaactagacagaatgattctcagaaactcctttgtgatgtgtgtgttcaactcacagagtttaacctttcttttcatagagcagttagtaaacactctgtttataaagtctgcaagtggatattcagaaccctttgaggccttcgttggaaacgggatttcttcatattatgctagacagaagaattcccagtaacttccttgtgttgtgtgtgttcaattcacagagttgaactttgatttacacagagcagatttgaaacactctttttgtggaatttgcaagtggagatttcaagcgctttgaggccaaaggcagaaaaggaaatatcttcgtataaaaactatacagaatcattctcagaaactgctgcgtgatgtgtgtgttcaaccctcagagtttaactttccttttcattcagcggtttggaaacactctgtttgtaaagtctgcacgtggatattttgaccacttagaggtcttcgttggaaacgggtttttttcatgtaaggctagacagaagaattcctagtaacttccttgtgttgtgtacattcaactcacagagttgaacgttcccttagacagagcagatttgaaacactctttttgtgcaattggcaagtggtgatttcagccgctttgaggtcaatggtagaaagggaaatatcttcgtattaaaactagacagaatgattctcagaaactcctttgtgatgtgtgcgttcaactcacagagtttaacctttctgttcatagagcagttaggaaacactctgtttgtaaagtctgcaagtggatattcagacctccttgaggccttcgttggaaacgggatttcttcatgttctgctagacagaagaattctcagtaacttccttgtgttgtgtgtattcaactcacagagttgaacgatcctttacacagagcagacttgaaacactctttttgtggaattggcaagtggagatttcagccgctttgaggtcaatggtagaaaaggaaatatcttcgtataaagactagacagaatgattctcagaaacttcattgtgatgtgtgcgttcaactcacagagtttaacctttcttttcatagagcagttaggaaacactctgtttgtaaagtctgcaagtggatattcagacctctttgaggccttcgttggaaacgggtttttttcataaaaggctagacagaagaattctcagtaacttccttgtgttgtgtgtattcaactgacagagttgaactttcatttagagagagcagatttgaaacactgtttttgtggaatttgcaagtggagatttcaagcgctttggagccaaaggcagaaaaggaaatatcttcgtataaaaactagacagaatcattctcagaaactgctctgcgatgtgtgcgttcaactctcagagtttaacttttcttttcattcagcagtttggaaacactctgttggtaaagtctgcacgtggatattttgaccacttagaggccttcgttggaaacgggattttttcctgtaaggctagacagaagaattcccagtaacttccttgtgttgtgtgcattcaactcacagagttgaacgttcccttagacagagcagatttgaaacattctatttgtgtaatttgaaagtgtagatttcaagcgctttaaggtcaatggcagaaaaggaaatatcttcgtttcaaaactagacagaatcattcccacaaactgcgttgtcatgtgttcgttcaactcacagagtttaacctttcttttcatagagcagttaggaaacagtctgtttgtaaattctgtaagtggatattctgacatcttgtggccttcgttggaaacgggatttcttcatattctgctagacagaagaattctcagtaacttcttggtgttgtgtgtattcaactcacagagttgaacgatgctttacacagagcagacttgaatcactcgttttgtggaatttgcaagtggagatttcagccgctttgaggccaaaggcagaaaaggaaatatcttcgtataaaaactagacagaatgattctcagaaactcctttgtgatgtgtgcgttcaactcacagagtttaacctttcttttcatagagcagttaggaaacactctgcttgtaaagtctgcaagtgcatattcagccctctttgaggccttcgttggaaacgggtttttttcatataaggctagacagaagaattctcagtaacttccttgtgtcgtgtgtattcaactcacagagttgaatgatcctttacaaagagcagacttgaaacactctttttgtggaatttgcaagtggagatttcagccgctttgaggtcagtggtagaataggaaatatcttcgtataaaaactagacagaatgattctcagaaactcctttgtgatgtgtgcgttcaactcacagagtttaacctttcttttcatagagcagttaggaaacactctgtttataaagtctgcaagtggatattcagacctctttgaggccttcgttggaaacgggatttcttgatactatgctagacagaagaattctcagtaacttccttgtgttgtgtgtattcaactgacagagttgaactttcatttagacagaggagatttgaaacactctttttgtggaatttgcaagtggagatttcaagcgctttgattccaaaggcagaaaaggaaatatcttcgtataaaaactagacagaatcattctcagaaactgctctgcgatgtgtgagttcaactctcagagtttaacttttcttttcattcagcagtttggaaacactctgtttgtaaagtctgcacgtggataacttgaccacttagaggccttcgttggaaacgggtttttttcttgtaaggctagacagaagaattcccaggaacttccttgtgttgtgtacattcaactcacagagttgaacgttcccttagacagagcagatttgaaacactctttttgtgcaattggcaagtggtgatttcagccgctttgaggtcaatggtagaaaaggaaatatcttcttataaaaactagacagaatcattcccaaaaactgcgttgtgatgtgttccttcatctcacagagtttaacctttcttttcatagagcagttaggaaacagtctgtttgtaaattctgtaagtggatattctgacatcttgtggccttcgttggaaacgggatttcttcatattctgctagacagaagaattctcagtaacttccttgtgttgtgtgcattcaactcacagagttgaacgatactttacacagggcagacttaaaacactctttttgtggaatttgcaagcggagatttcagcctctttgaggttaatggtagaaaatgaaatatcttcgtatagaaactagacagaatgattctcataaactcctttgtgatgtgtgccttcaactcacagagtttaacctttcttttcatagagcagttagtaaacactctgtttataaagtctgcaagtggatattcagacccctttgaggccttcgttggaaacgggatttcttcatattatgctagacagaagaattctcagtaacttccttgtgttgtgtgtattcaactcgcagagttgaacgatcctttacacagagcagacttgaaacactctttttgtggaatttgcaagtggagatttcagccgctttgggttgaatggtagaataggaaatatcttcctatagaaactagacagagtgattctcagaaactcctttgtgatgtctgcgttcaactcacagagtttaacctttcttttcatagagcagttaggaaacactctgtttgtaaagtctgcaagtggatattcagacctccttgaggccttcgttggaaacggtatttcttcatattctgctatacagaagaattcccagtaacttccttgtgttgtgtgtgttcaactctgtgagttgaactttcatttacacagagcagattggaaacactctttttgtggaatttgcaagtggagatttcaagcgctttgaggccaaaggcagaaaaggaaatatccttcgtataaaaactagacagaatcattctcagaaactgctctgcgatgtgtgcgttcaaccctcagagtttaacttttcttttcattcagcagtttggaatcactctgtttgtaaagtctgcacgtggatattttgaccacttagaggccttcgttggaaactggtttttttcctgtaaggctagacagaagaattcccagtaaattccatgtgttgtgtgcattcaactcacagagttgaacgttcccttagacagagcagatttgaaacactctatttgtgcaatttgcaagtgtagatttcaagcgctttaaaggtcaatggcagaaaagggaatatcttcgtttcaaaactagacagaatcattcccacaaactgagttgtgatgtgttcgttcaactcacagagtttaacctttctgttcatagagcagtgaggaaacactctgtttgtaaagtctgtaagtggatattctgacatcttgtggccttcgttggaaacaggatttcttcatattctgctagacagaataattctcagtaacttccttgtgttgtgtgtattcaactgtcagagttgaacgatcctttacagagagcagacttgaaacactctttttgtggaatttgcaagtggagatttcagccgctttgaggtcaatggtagaataggaaatatcttcctatagaaactagacagaatgattctcagaaactcctttgtgatgtgtgcgttcaactcacagagtttaacctttctgttcatagagcagttaggaaacactctgtttgtaaagtctgcaagtggatattcagacctccttgaggtcttcgttggaaacgggatttctttatattctgctagacagaagaattctcagtaacttccttgtgttgtgtgtattcaactgacagagttgaactttcatttagagagagctgatttgaaacactgtttttgtggaatttgcaagtggagatttcaagcgctttggggccaaaggcagaaaaggaaatatctttgtataaaaactagacagaatcattctcagaaactgctctgcgatgtgtgcgttcaactctcagagtttaacttttcttttcattcagcagtttggaaacactctttttttaaagtctgcacgtggataatttgaccacttagaggccttcgttggaaacgggtttttttcatgtaaggctagacagaagtattcccagtaacttccttgtgttgtgtgcattcaactcacagagttgaacgttccctaggacagagcaggtttgaaacactctatttgtgcaatttgcaagtgtagatttcaagcgcattaaggtcaatggcagaaaaggaaatatcttcgattcaaaactagacagaatcattcccacaaactgcgttgtgatgtgttcgttcaactcacagagtttaacctttctgttcatagagcagttaggaaacactctgtttatacagtctgcaagtggatattcagacctccttgaggccttcgttggaaacgggatttcttcatattctgctagacagaagaattctcagtaacttccttgtgttgtgtgtattcaactcacacagttgaacgatcctttacacagagcagacttgaaacactctttttgtggaatttgcaagtggagatttcatccgctttgaggtcaatggtagaataggaaatatcttcctatagaaactagacagaatgattctcataaactcctttgtgatgtgtgcgttcaactcacagagtttaacctttcttttcatagagcagttaggaaacactctgtttgtaaagtctgcaagtggatattcagacctctttgagtccttcgtttgaaacgggatttcttcatattctgctagacagaagaattctcagtaacttccttgtgttgtgtgtattcaactcacagatttgaacgatcctttacacagagcagacttgtaacactctttttgtggaattcgcaagtggagatttcagcagctttgaagtcaaaggtagaaaaggaaatatcttcctataaaaactagacagaatgattctcagaaactcctttgggatgtgtgcgttcaactcacagagtttaacctttcttttaatagagcagttaggaaacactctggttataaagtctgcaagtggatattcagacctctttgaggccttcgttggaaacgggatttcttcatattctgctagacagaagaattcccagtaacttccttgtgttgtgtgtgttcaactcacagagttgaactttcatttacacagagcagatttgaaacactctttttgtggaatttgcaagtggagatttcaagcgctttgaggccaaaggcagaaaaggaaatatcttcatttcaaaactagacagaatcattctcagaaactgctctgcgatgtgtgcgttcaactctcagagtttaactttgcttttcattcagcagtttggaaacactctgtttgtaaagtctgcacgtggataatttgaccacttagaggccttcgttggaaacgggtttttttcatgtaaggctagagagaagtattcccaggaacttccttctgttgtgtacattcaactcacagagttgaacgttcccttagacagagcagatttgaaacactctttttgtgcaattggcaagtggtgatttcagccgctttgaggtcaatggtagaaaaggaaatatcttcgtataaaaactagacagaatgattctcagaaacttcattgtgacgtgtgcgttcaagtcacagagtttaacctttcttttcatagagcagttaggaaacactctgtttgtaaagtctgcaagtggatattcagacctctttgaggccttcgttggaaacgggatttcttcatactgtgctagacagaagaattctcagtaacttccttgtgttgtgtgtattcaactcacagagttgaacgatcctttacagagagcagacttgaaacacactttttgtggaatttgcaagtggagatttcagccgctttgaggtcaatggtagaaaaggaaatatcttcgtataaagactagacagaatgattctcagaaactcctttgtgatgtgtgcgttcaacaaacagagtttaacttttcttttcatagagcagttaggaaacactctgtttgtaaagtctgcaagtggatattcagagctctttgaggccttcgttggaaacgggatttcttcatattctgctagacagaagaattctcagtaacttccttgtgttgtgtgtgttcaactcacagagttcaacgatgctttacacagagtagacttgaaacacactttttgttgaatttgcaagtggagatttcagccgctttgaggtcaatggtagaataggaaatatcttcctatagaaactagacagaatcattctcagaaactgctctgcgatgtgtgcgttcaactctcagagtttaacttttcttttcattcagcagtgtggaaacactctgtttgtaaagtctgaaggtggatatgttgaccacttagaggccttcgttggaaacgggtttttttcctgtaaggctagacagaggaattctcagtaacttccttgtgttgtgtgtattcaactcacagagttgaacgatcctttacacagagcagacttgaaacactctttttgtggaatttgcaagtggagatttcagccgctttgagttcaatggtagaataggaaatatcttcctatagaaactagacagaatgattctcagaaactcctttgtgatgtgtgcgttcaactcacagagtttaacgtttcttttcatagagcagttaggaaacactctgtttgtaaagtctgcaagtggatattcagacctccttgaggctttcgttggaaacgggatttcttcctattctgctagacagaagaattctcagtaacttccttctgttgtgtgtattcaactgacagagttgaagtttcatttagagagagcagatttgaaacactgtttttgtggaatttgcaagtggagatttcaagcgctttggggccaaaggcagaaaaggaaatatcttcgtataaaaactagacagaatcattctcagaaactgctctgcgatgtgtgcgttcaactctcagagtttaacatttcttttcattcagcagtttggaaacactctgtttgtaaagtctgcacgtggatattttgaccacttagaggccttcgttgcaaacgggtttttttcctgtaaggctagacagaagaattctcagtaacttccttgtgttgtgtgtattcaactcacagagttgaacgatcctttacacagagcagtcttgaaacactcttgttgtggaatttgcaagtggagatttcagccgctttgaggtcaatggtagaataggaaatatgttcctatagaaactagacagaatgattctcaaaaactcctttgtgatgtgtgcgttcaactcacagagttcaacctttcttttcctagagcagttgggaaacactctgtttgtaaagtctgcaagtggatattcagacatccttgaggctttcgttggaaacgggatttcttcatgttctgctagacagaagaattctcagtaacttccttgtgttgtgtgtattcaactgacagagttgaacattcatttagagagagcagatttgaaacactgtttttgtggaatttgctagtggagatttcaagagctttggggccaaaggcagaaaaggaaatatcttcgtataaaaactagacagaaatcattctcagaaactgctctgcgatgtgtgcgttcaactctcagagtttaacttttcttatcattcagcagtttggaaacactctgtttgtaaagtctgcacgtggataatttgaccacttagaggccttccttggaaacgggtttttttcatgtaaggctagacagaagaattcccagtaacttccttgtgttgtgtacattcaactcacagagttgaacgttcccttagagagaacacatttgaaacactctttttgtgcaattggcaagtggtgatttcagccgctttggggtcaatggtagaaaacgaaatatcttcgtataaaaactagacagagtgattctcagaaactcctttgtgatgtgtgcattcaactcacagagtttaacctttcttttcatagagcagttaggaaacactctgtttgtaaagtctgcaagtggatattcagacctctttgaggccttcgttggaaacgggattttttcatataaggctagacagaagaattctcagtaacttccttgtgttgtgtgtattcaactcacaggagttgaacgatcctttacacagagcagacttgaaacactctttttgcggaatttgcaagtggagatttcagccgctttgaggtcaatggtagaataggaaatatcttcctatagaaactagacagaatgattctcagaaactcctttgtgatgtgtgcgttcaactcacacagtttaacctttcttttcatagagcagttgggaaacactctgtttgtaaagtctgcaagtggatattcagacctccttgcggccttcgttggaaacgggatttcttcatattatgctagacagaagaattctcagtaacttccttgtgttgtgtgtattcatctgacacagttgaactttcatttagagagagcagatttgaaacactatttttgtggaatttgcaagtggagatttcaagcgctttggggccaaaggcagaaaagtaaatatcttcgcatacaaactagacagaatcactctcagaaactgctctgtgatgtgtgcgttcaactctcagagtttaacttttcttttcattcagcagtttggaaacactctgtttgtaaactctgcacgtggatattttgaccacttagaggccttctttggaaacgggtttttttcatgtaaggatagacagaagaattctcagtaacttccttgtgttgtgtgctttcaactcacggagttgaacgatcctttacacagagcagattagaaacactctttttgtggaatttgcaagtggagatttcagacactttgaggtcaatgatagaaaaggaaatatcttcgtataaaaactagacagaacgattctcagaaactcctttgtgatgtatgcgttcaactcacagagtttaacctttcttttcatagagcagttaggaaacactctgtttgtaaagtctgcaagtggatattcagacctctttgaggccttcgttggaaacgggatttcttcatattctgctagacagaagaattctcagtaacttccttgtgttgtgtgtattcaactgacagagttgaactttcatttagagagagcagatttgaaaaactgtttttgtggaatttgcaagtggagatttcaagcgctttggggccaaaggcagaaaaggaaatatcttcgtataaaaactagacagaatcattctcagaaactgctctgcgatgtgtgcgttcagctctcagagtttaacttttcttttcattcagcagtttggaaacactctgtttgtaaagtctgcacgtggatattttgaccacttagaggccttcgttggaaacgggtttttttcatgtaaggctagacagaagaattctcagtaacttccttgtgttgtgtgtattcaactcacagagttgaacgattctttacacagagcagacttgtaacactctttttgtggaatttgcaagtggagatttcagccgctttgaagtcaaaggtagaaaaggaaatatcttcctataaaaactacacagagtgattctcagaaactcctttgtgatgtgtgcgttcaactcacagagtttaacctttcttttcatagagcagataggaaacactctgtttgtaaagtctgcaagtggatattcagacctccttgaggccttcattggaaacgggatttcttcatattctgctagacagaagaattcccagtaacttccttgtgttgtgtgtgttcaactcacagagttgaactttcatttacacagagcagatttgaaacactctttttgtggaatttgcaagtggaggtttcaagcgctttgaggccaaaggcagaaaaggaaataccttcgtataaaaactagacagaatcattctcagaaactgctctgcgatgtgggcgttcaactctcagagtttaacttttcttttcattcagcagtttggaaacactctgtttgtaaagtctgcacgtggatattttgaccatttagaggccttcgttggaaacgggtttttttcttgtaaggctagacagaagaattcccagtaacttccttgtgtagtgtacattcaactcacagagttgaacgttcccttagacagagcagatttgaaacactctttttgtgcaactggcaagtggagatttcaagcgctttgaggtcaatggcagaaaaggaaatatcttcgtttcaaaactagacagaatcattcccacaaactgcgtagtgatgtgttcgttcaactcacagagtttaacctttctgttcatagaacagttaggaaacactctgtttgtaaagtctgcaagtggatattcagacctccttgaggccttcgttggaaacgggatttcttcatattctgctagacagaagaattctcagtaacttccttgtgttgtgtgtattcaactcacagagttgaacgatcctttacacagagcagacttgaaaccctctttttgtggaatttgcaagtggagatttcagacgctttgaggtcaatggtagaaaaggaaatatcttcttataaagactagacagaatgattctcagaaactcctttgtgatgtgtgtgttcaactcacagagtttaacctttcttttcatagagcagttaggaaacactctgtttgtaaagtctgcaagtggatattcagacctctttgaggccttcgttggaaacgggtttttttcatatagggctagacagaagaattctcagtaacttctttgtgttgtgtgtattcaactcacggagttgaacgatcctttacacagagcagacttgaaacactctttttgtggaatttgcaagtggagatttctgccgctttgaggtcaatggtagaataggaaatatcttcctatagaaaatacacagaatgtttctcagaaactcctttgagatgtgtttgttcaactcacagagtttaacctttcttttcatagagcagttaggaatcactctgtttgtaaagtctgcaagtggatattcagacctctttgaggccttcgttggaaacgggtttttttcatataaggctagacagaagaattcccagtaacttccttgtattgtgtgtgttcaactcacagagttgaactttcatttacacagagcagatttgaaacactctttttgtggaatttgcaaatggaggtttcaagcgctttgaggccaaaggcagaaaaggaaatatcttcgtataaaaactagacagaatcattctcagaaactactctgcgatgtgtgcgttcaactctcagagtttaacttttcttttcattcagcagtttggaaacactctgtttgtaaagtctgcacgtggatattttgaccacttagaggccttcgttggaaatgggtttttttcctgtaaggctagacagaagaattcccagtaactttccttgtgttgtgtacattcaactcacagagttgaaagttcccttagacacagcagatttgaaacactctttttgtgcaattggcaaatggagatttcaagcgctttaaggtcaatggcagaaaaggaaatatcttcgtttcaaaactagacagaatcattcccacaaactgcgttgtgatgtgttcgttcaactcacagactttaaactttcttttcatagagcagttaggaaacagtctgtttgtaaattctgtaagtggatattctgacatcttgtggccttcgttggaaacgggatttcttcatattctgctagacagaagaattctcagtaacttccttgtgttgtgtgtattcaacttacagagttgaatgatcctttacacagagcagacttgaaacactctatttgtagaatttgcaattggagatttcagccgctttgaggtcagtagtagaaaaggtaatatcttcgtagaaaaactaaacagaatgattctcataaactcctttgtgatgtgtgcattcaactcacagagtttcacctttcttttcatagagcagttaggaaacactctgtttgtaaagtctgcaagtggatattccgacctccttgaggccttccttggaaacgggatttcttcatattctgctagacagaagaattctcactaacttccttgtgttgtgtgtattcaactcacagagttgaacgatcctttacacagagcagacttgaaacactctttttgtggaatttgcaagtggagatttcagccgctttgaggtcaatggtagaaaaggaaatatcatcgtataaagactagacagaatgattctcagaaactcctttgtgatgtgtgcgttcaactcacagagtttaacttttcttttcatagaccagttaggaaacactctgtttgtaaagtctgcaagtggatattcagacctcctttgtggccttcgttggaaacgggatttcttcatattatgctagacagaagaattcccagtaacttccttgtgttgtgtgtgttcaactcacagtagttgaacttccatttacacagagcagatttgaaacactctttttgtggaatttgcaagtggagatttcaagcgctttgaggccaaaggcagaaaaggaaatatcttcctttcaaaactagacagaatcattctcagaaactgctctgtgatgtgtgcgttcaactctcagagtttaacttttcttttcattcagcagtttggaaacactctgtttgtaaagtctgcacgtggataatttgacaacttagaggccttctttggaaacgggtttttttcatgtaaggctagacagaagaattctcagtaacttccttgtgttgtgtgtattcaactcacagagttgaacgatcctttacacagaacagacttgtaacactctttttgtggaatttgcaagtggagatttcagccgctttgaagtcaaagttagaaaaggaaatatcttcctataaaaactagacagaatcattccgacaaactgcgttgtgatgtgttcgttcaactcacagagtttaacctttctgttcatagagcagttaggaaacactctgtttgtaaagtctgttaagtggatattctgacatcttgtggccttcgttggaaacgggatttcttcatattctgctagacagaagaattctcagaatcttcccttgtgttgtgtgtattcaactcacagagttgaacgatggtttacacagagcagagttgaaacactctttttgtggaatttgaaagtggagatttcagccgctttgaggtcaaaggtagaaaaggaaatatcttcgtataaaaactagacagaatgattctcagaaactcctttgtgatgtgtgcgttcaactcacagagtttaacttttcttttcatagagcagttaggaaacattctgtttgtaaagtctgcaagtggatattcagacctctttgtggccttcgttggaaacgggatttcttcatattatgctagacagaagaattctcagaatcttccttgtgttgtgtgtattcaactcacagagttgaacgatggtttacacagagcagatttgaaacactctttttgtggaatttgcaagtggagatttcagccgctttttggtcaatggtagaaaaggaaatatcttcgtataaaaactagacagaatgattctcagaaactcctttgtgatgtgtgcgttcaactcacagagtttaacctttcttttcatagagcagttaggagacactctgtttgtaaagtctgcaagtggatattgagacatccttgaggctttcgttggaaacgggatttcttcatattctgctagaaagaggaattcccagtaacttccttgtgttgtgtgtgttcaactcacagagttgaactttgatttacacagagcagatttgaaacactctttttgtggaatttgcaagtggagatttcaagcgctttgaggccaaaggcagaaaaggaaatatcttcgtataaaaactagacagaatcattttcagaaactgctctgcgatgtgtgcgttcaactctcagagtttaacttttcttttcattcagcagtgtggaaacactctgtttgtaaagtctgcacgtggatattttgaccacttagaggccttcgttggaaacgggtttttttcctgtaaggctagacagaagaattcccagtaacttccttgtgttgtgtgcattcaactcacagagttgaacgttcccttagacagagcagatttgaaacacactatttgtgcaatttgcaagtgtagatttcaagcgctttaaggtcaatggcagaaaaggaaatatcttcgtttcaaaactagacagaatcattcccacaaactgcgttgtgatgtgttcgttcaactcacagagtttaacctttcttttcatagagcagttaggaaacagtctgtttgtaaattatgtaagtggatattctgacatcttgtggccttcgttggaaacaggatttcttcatattctgctagacagaagaattctcagaatcttccttgtgttgtgtgtattcaactcacagagttgaaggatcctttacacagagcagatttgaaacactcttttggtggaatttgcaaatggagatttcagccgctttgaggtcaatggtagaaaaggaaatatcttcgtataaaaactagacagaatgattctcagaaacttctttgtgatgtgtgcgttcaactcacagagtttaacctttctattcatagagcagttagaaaacactctgtttgtaaactctgcaagtggatattcagacctctttgaggccttcgttggaaacgggatttcttcatactatgttagacagaagaattctcagtaacttccttgtgttgtgtgtattcaactcacagagttgaacgatcctttacacagagcagacttgaaacactctttttgtggaatttgcaagtggagatttcagccgctttgtggtcaatagtagaataggaaatatcttcctatagaaactagacagaaagattctcagaaactactttgtgatgtgtgcgttcaactcacagagttcaacctttcttttcatagagcagttaggaaacactctgtgtgtaaagtctacaagtggatattcagacctccttgaggccttcgttggaaacgggatttcttcatattctgctagacagaagaattcccagtaacttccttgtgttgtgtgtgttcaactcacagagttgaactttcatttacacagagcagatttgagacactctttttgtgaaatttgcaaatggagatttcaagcgctttgaggccaaaggcagaaaaggaaatatcttcgtataaaaactagacagaatcattctcagaaactgctctgcgatgtgtgcgttcaactctcagagtttaacttttcttttcattcagcagtttggaaacactctgtttgtaaagtctgcacgtgcataatttgaccacttagaggccttcgttggaaacgggtgtttttcatgtaaggctagacagaagaattcccagtaacttccttgtgttgtgtgcattccactcacagagatgaacgttcccttagacagaacagatttgaaacactctatttgtgcaatttgcaagtgtagatttcaagcgctttaaggtcaatggcagaaaaggaaatatcttcgtttcaaaactagacagaatcattcccacaaactgcgttgtgatgcgttcgttcaactcacagagtttaacctttcttttcatagagcagttaggaaacagtctgtttgtcaattctgtaagtggatattctgacatcttgtggccttcgttggaaacgggatttcttcatattctgctagacagaagaattctcagtaactgccttgtgttgtgtgtattcaactcacagagttgaacgatcgtttacacagagcagacttgaaacgctctttttgtggaacttgcaagtggagatttcagccgctttgaggtcaatggtagaataggaaatatcttcctatagaaactagacagaatgattctcagaaactcctttgtgatgtgtgcgttcaactcacagagtttaacctttcttttcatagagcagttaggaaacactctgtttgtaaagtctgcaagtggatattcagacctccttgaggccttcgttggaaacaggatttcttcatattatgctagacagaagaattctcagtaacttccttgtgttgtgtgtattcaattcacagagttgaacgatcctttacacagagcagacttgaaacactctttttgtgtaatttgcaagtggagatttcagccgctttgaggtcaatggtagaaaaggaaatatcttcgtataaaaactagacagaatgattctcagaaactcctttgtgatgtgtgcgttcaactcacagagtttaacctttcttttcatagagcagttaggaaacactctgtttgtaaagtctgcaagtggatattcagacctctttgaggccttcgttggaaacgggttttttacttataaggctaaacagaagaattcccagtaacttccttgtgttgtgtgtgttcaactcacagagttgaactttcatttacacagagcagatttgaaacactctttttgtggaatttgcaaatggagatttcaagcgctttgaggccaaatgcagaaaaggaaatatcttcgtataaaaattagacagataatcattctcagaaactgctctgcgatgtgtgcgttcaactctcagagtttaacttttcttttcattcagcagtttggaaacactctgtttgtaaagtctgcacgtggatattttgaccacttagaggccttcgttggaaacgggtttttttcctgtaaggctagacagaagaattcccagtaacttccttgtgttgtgtgcattcaactcacagagttgaacgttcccttagacagagcagatttgaaacactctatttgtgcaatttgcaagtgtagatttctagcgctttaaggtcaatgacagaaaaggaaatatcttcgtttcaaaactagacagaatcattcccacaaactgcgttgtgatgtgtttgttcaactcacagagtttaacctttcttttcatagagcagttagcaaacagtctgtttgtcaattctgtaagtggatattctgacatcttgtggccttcgttggaaacgggatttcttcatattctgctagacagaataattctctgtaacttccatgtgttgtgtgtattcaactcacagagttgaacgatcctttacacagagcagacttgaaacactctttttgtggaatttgcaagtggagatttcagccgctttgaggtcaatggtagaataggaaatatcttcctatagaaactagacagaatgattctcataaactcctttgtgatgtgtgcgttcaacacacagagtttaacctttctgttcatagagcagttaggaaacactctgtttgtaaagtctgtaagtggatattctgacaccttgtggccttcgttggaaacgggatttcttcatattctgctagacagaagaattctcagtaactttccttgtgttgtgtgtattcaactcacagagttgaacgatcctttacacagagcagacttgaaacactctttttgtggaatttgcaagtggagatttcagccgctttgagttcaatggtagaataggaaatatcttcctacagaaactagacagaatgattctcagaaactcctttgtgatgtgtgcgttcaactcacagagtttaacttttcttttcatagagcagttaggaaacactctgtttgtaaagtctgcaagtggatattcagacctctttgaggccttcgttggaaacgggttttcttcatattctgctagacagaagaattctcagtaacttccttgtgttgtgtgtattcaactgacagagttgaactttcatttagagagagcagatttgaaaccctgtttttgtggaatttgcaagtggagatttcaagcactttggggccaaaggcagaaaaggaaatatcttcgtataaaaactagacggaatcattctcagaaactgctctgggatgtgtgcgttcaactctcagagtttaacttttcttttcattcagcagtttggaaacactctgtttgtaaagtctgcacgtggataacttgaccacttggaggccttcgttggaaacgggtttttttcatgtaaggctagacagaagaattctcagtaacttccttgtgttgtgtgtattcaactcacagagttgaatgatcctttacacagaacagtcttgaaacactctttttgtggaatttgcaagtggagatttcagccgctttgaggtcaatggtacaataggaaataccttcctatagaaactagacagaatgattctcagaaactcctttgtgatttgtgcgtttaactcacagagtttaacctttcttttcatagagcagttaggaaacactctgtttgtaaagtctacaagtggatattcagacctctttgaggccttcgttggaaacgggtttttttcatataaggctagacagaagagttctcagtaacttccttgtgttgtgtgtattcaactcacagagttgaactttcatttagagagagcagatttgaaacactgtttttgtggaatttgcaattggagatttcaagtgctttggggccaaaggcagaaaaggaaatatcttcgtataaaaactagacagagaatcattatcagaaactgctgcgtgatgtgtgcgttcaactctcagaatttaacttttcttttcattcagcggtttggaaacactctgtttgtaaagtctgcacgtggatatattgaccacttagaggccttcgttggaaacgggtttttttcatgtaaggctagacagaagaattcccagcaacttccttgtgttgtgtgcattcaactcacagagttgaacgttcccttagacagaccagatttgaaacactctatttgtgcaatttgcaagtgtagatttcaagcgctttgaggtcaatggcagaaaaggaaatatcttcgtttcaaaactagacagaatcattcccacaaactgcgttgtgatgtgttcgttcaactcacagagttaaacttttcttttcatagaacagttaggaaacactctgtttgtaaagtctgtaagttgatattctgacatcttgtggccttattggtaacgggatttcttcatattctgctagacagaagaattctcagtaacttccttgtgttgtgtgtattcacctcacagatttgaacgatcctttacaaagagcagacttgaaacactcttttagtggaatttgcaagtggaggtttcagcctctttgaggtcaatggtagaataggaaatatcttcctatagaaactagacagaatgattctcacaaactcctttgtgatgtgtgcgttcaactcacagagtttaacctttgtttacatagagcagttaggaaacacactgtttgtaaagtctgcaagtggatattctgacctccttgaggccttcggtggaaacgggatttcttcatattctgctagacagaagaattctcagtaacttccttgtgttgtgtgtattcaactcaaagagttgaacgacactttacacagagcagacttgaaacactctttttgtggaatttgcaattggagatttcagccgctttgaggtcaatggtaggataggaaatatcttcctatagaaactagacagaatgattctcagaaactcctttgtgatgtgtgcgttcaactcacagagtttaacctttcttttcttagagcagttaggaaacactctgtttgtaaagtctgcaagtggatattcagacctccttgaggccttcgttggaaatgggatttcttcatattctgctagacagaagaaattcccagtaacttccttgtgttgtgtgtgttcaactcacagagttgaactttcatttacacagagcagatttgaaacactctttttgtggaatttgcaaatggagatttcaagcgctttgaggccaaaggcagaaaaggaaatatctttgtataaaaactagacagaatcattctcagaaactgctgcgtgatgtgtgcgttcaactctcagagtttaacttttcttttcattcagcggtttggaaacactctgtttgtaaagtctgcacgtggaaattttgaccacttaggggccttcgttggaaacgggtttttttcatgtaaggctagacagaagtattcccagtaacttccttgtgttgtgtgcattcaactcacagagttgaacgttcccttagacagagcaggtttgaaacactctatttgtgcaatttgcaagtgtagatttcaagcgctttaaggtcaatggcagaaaaggaaatatcttcgtttcaaaactagacagaatcattcccacaaactgcgttgtgatgtgttcgttcaactcacagagtttaacctttctgttcatagagcagttaggaaacactctgtttttaaagtctgccagtggatattcagacctctttgaggccttcgttggaaacgggatttcttcatattctgctagacagaagaattctcagtaacttccttgtgttgtgtgtattcaactcacagagttgaacgatcctttacacagaggagacttgaaacactctttttgtggaatttgcaagtggagatttcacccgctttgaggtcaatggtagaataggatatatcttcctatagaaaatagacagaatgattctcagaaactcttttgggatgtgtgcgttcaactcacagagtttaacctttctgttcatagagcagttaggaaacactctgtttgtaaagtctgcaagtggatattcagacctccttgagaccttcgttggaaacgggatttcttcatattccgctagacagaagaattctcagtaacttccttgtgttgtgtgtattcaactcacagagttgaacgatcctttacacagagcagacttgtaacactctttttgtggaatttgcaagtggagatttcaagcgctttgaggccaaatgcagaaaaggaaatatcttcgtttcaaaactagacagaatgattctcagaaactcctttgtgatgtgtgtgttcaactcacagagtttaacctttcttttcatagagcagttaggaaacactctgtttataaagtctgcaagtggatattcagacccctttgaggtccttcgttggaaacgggatttcttcatattatgctagacagaagaattctcagtaacttccttgtgttgtgtgtattccactcacagagttgaactttcatttatagagagcagatttgcaacactgtttttgtggaatttgcaagtggagatttcaagcgctttggggccaaaggcagaaaaggaaatatcttcgtataaaaactagacagaatcattctcagaaactgctctgcgatgtgtgcgttcaactctcagagtttgacttttcttttcattcagcagttttgaaacactctgtttgtaaagtctgcacgtggatattttgaccacttagaggccttcgttggaaacgggtttttttcctgtaaggctagacagaagaattcccagtaacttctttgtgttgtgtgcattcaactcacagagttgaacgttcctttagacagagcagatttgaaacactctttttgtgcaatttgcaagtggagatttcaagcgctttgaggtcaatggcagaaaaggaaataacttcgtttcaaaactagacagtatcattcccacaaactgcattgtgatgtgtgcgttcaactcacagagtttaacctttcttttcatagagccgtttgtaagcgctctgtttgtcaagtctgcaagtggatattctgacctctttgaggacttcgttggaaacaggatttcgtcctataatactagacagaagaattctcagtaacttccttgtgttgtgtgtattcaactcacagagttgaacgatcctttacacagagcagacttgaaacactctttttctggaatttgcaagtggagatttcagccgatttgaggtcaatggtagaataggaaatatcttcctatagatactagacagaatgattctcagaacctcctttgtgatgtgtgcgttcaactcacagagtttaacctttcttttcatagagcagttaggaaacactctgtttgtaaagtctgcaagtggatattcagacatccttgaggctttccttggaaacgggatttcttcatattctgctagaaagaagaattctcagaaacttcgttgtgttgtgtgttttcaaatcacagagttcaacgatcctttacacagagtagacttgaaacactctttttgtggaattggcagggtggagatttcagctgctttgaggtcaatggtagaaaaggaaatatcttcgtataaaaactagacagaatgattctcggaaactcctttgtgaagtgtgtgttcaactcacagagtttaacctttcttttcatagagcagttaggaaacactctgtttgtaaagtctgcaagaggatattcagacctctttgaggccttcgttggaaacgggtttttttcatataaggctagacagaagaattcccagtaacttccttgtgttgtgtgtgttcaactcacagagttgaactttcatttacacagagcagatttgaaacactctttttgtggaatttgcaagtggagatttcaagcgctttgaggccaaaggcagaaaaagaaatatcttcgtttcaaaactagacagaatgattctcagaaacttctttgtgatgagtgcgttcaactcacagattttaacctttcttttcatagagcagttaggaaacactctgtttgtaaagtctgcacgtggatattttgacctcttttaggccttccttggaaacgggtttttttcatgtaagcctagacagaagaattccgagtaacttccttgtgttgtctgcattcaactcacagagttgaacgttcccttagacagagcagatttgaaacactctatttgtgcaatttgcaagtgtagatttcaagctctttaaggtcaattgcagaaaaggaaatatcttcgtttcaaaactagacagaatcattcccacaaactgcgttgtgatgtgttcgttcaactcacagagtttaacctttctgttcatagagcagttaggaaacactctgtttgtaaagtctgtaagtggatattctgacatcttgtggccttcgtgggaaacgggatttcttcatattctgctagacagaagaattctcagaatcttccttgtgttgtgtgtattcaactcacacagttgaacgattgtttacacagagcagatttgaaacactctttttgtggaatttgcaagtggagatttcagccgctttgaggtcaatggtagaaaaggaaatatcttcatataaaaactagacagaatgattctcagaaactcctttgtgatgtgtgcgttcaactcacagagtttaccctttctgttcatagagcagttaggaaacactctgtttgtaaattctgcaagtggatattcagacctacttgaggtcttcggtggaaacgggatttcttcatattctgctagacagaagaattctcactaacttccttgtgttgtgtgtattcaactcacagagttgaacgatcctttacacagagcagacttgaaacactctttttgtggaatttgcaagtggagctttcagccgctttgaggtcaatagtagaaaaggaaatatcttcgtagaaaaactagacagaaagattctcagaaactcctttgtgatgtgtgcgttcaactcacagagtttaacctttcttttaatagagcagttgggaaacactctgtttgtatactctgcaagtggatattcagacctctttgaggccttcgttggaaacgggatttcttcatattctgctagacagaagaattctcagtaacttccttgtgttgtgtgtattcaactgacagagttgaactttcatttagacagagcagatttgaaacactctttttgtggaatttgcaagtggagatttcaagcgctttgaggccaaagggagaaaaggaaatatcttcgtataaaaactagacagaatcattctcagaaactgctctgcgatgcgtgcgttcagctctcagagtttaccttttcttttcattcagcagtttggaaacactctgtttgtaaagtctgcacgtggatattttgaacacttagaggccttcgttggaaaccggtttttgtcatgtaaggctagacagaagaattcctagtaacttccttgtgttgtgtacattcaactcacagagttgaacgttcccttagacagagcagatttgaaacactctttttgtgcaattggcaagtggtgatttcagccgctttgaggtcaatggtagaaaaggaaatatcttcgtattaaaactagacagaatcattcccacaaactgcgttgtgatgtgttcgttcaactcacagagtttaacctttctgttcatacggcagttaggaaacactctgtttgtaaagtctgtaagtggatattctgacattttgtggccttcgttggaaaggggatttcttcatattctgctagacagaagaattctcagaatcttccttgtgttgtgtgtattcaactcacagagttgaacgatggtttacacagagcagatttgaaacactcttttggttgaatttgcaagtggagatttcagccgctttgaggtcaatggtagaaaaggaaatatcttcgtataaaaactagacagaatgattctcagaaacttctttgtgatgtgtgcgttcaactcacagagtttaacctttcttttcatagagcagttaggaaacactctgtttgtaaagtctgcaagtggatattcagacctctttgaggccttcgttggaaacgggatttcttcatacaatgctagacagaagaattctcagtaacttccttgtgttgtgtgtattcaactcacagaattgaacgatcctttacacagagcagacttgaaacactctttttgtggaatttgcaagtggagatttcagccgctttgagttcaatggtagaataggaaatatcttcctatagaaactagacagaatgattctcagaaactcctttgtgatgtgtgcgttcaacacacagagtttaacttttcttttcatacagcagttaggaaacactctgtttgtaaagtctgcaagtggatattcagacctctttgaggccttcgttggaaacgggatttcttcatattatgctagacagaagaattctcagtaacttccttgtgttgtgtgtattcaactgacagagttgaactttcatttagagagagcagatttgaaacactgtttttttggaatttgcaagtggagatttcaagcgctttggggccaaaggcagaaaaggaaatatcttcgtataaaaactagacagaatcattctcagaaactgctctgcgatgtgtgcgttcaactctcagagtttaacttttcttttcattcagcagtttggaaacactctgtttgtaaagtctgcacgtggataatttgaccacttagaggccttcgttggaaacgggatttcttcatactgtgctagacagaagaattcccagtaacttccttgtgttgtgtgcattcaactcacagagttgaacgttcccttagacagagctgatttgaaacactctatttgtgcaatttgcaagtgtagatttgaagcgctttcaggtcaatggcagaaaaggaaatatcttcgtttcaaaactagacagaatcattcccacaaactgcgttgtgatgtgttcgttcaactcacagagtttaacctttcttttcatagagcagttaggaaacactctgtttgtaaagtctgcaagtggatattcagacctctttgaggccttcgttggaaacgggatttcttcatgttctgctagacagaagaattctcagaatcttcctagtgttgtgtgtattcaactcacagagttgaacgatggtttacacagagcagatttgaaacactctttttgtggaatttgcaagtggagatttcagccgctttgaggtcaatggtagaaaaggaaatatcttcgtataaaaactagacagaatgattctcagaaactcctttgtgatgtgtgcgttcaactcacagagtttaacctttcttttcatagagcagttaggaaacactcggtttgtaaagtctgcaagtggatattcagacctctttgaggccttcgttggaaacgggtttttttcatataaggctagacagaagaattctcagaatcttccttgtgtggtgtgtattcaactcacagagttgaacgatcctttacacagagcagacttgaaacactctttttgtggaatttgcaagtggagatttcagccgctttgaggtccatggtagaaaaggaaatatcttcgtataaaaactagacagaatgattctcagaaactcctttgtgatgtgtgcgttcaactcacagagtttaacctttctttttatagagcagttaggaaacactctgtttgtaaagtctgcaagtggatattcagacctccttgaggccttctttggaaacgggatttcttcctattatactagacagaagaattctcagtaacttctttgtgttgtgtgtattcaactgacagagttgaactttcatttagagagagcagatttggaacactgtttttgtggaatttgcaagtggagatttcaagcgctttggggccaaaggcagaaaaggatatatcttcgtataaaaactagacagaatcattctcagaaactgctgcgtgatgtgtgcgttcaactctcagagtttaacttttcttttcattcagcggtttggaaacactctgtttgtaaagtctgcacatggatattttgaccacttagaggccttcgttggaaacgggtttttttcatgtaaggctagacagacgaattcccagtaacttccttgtgttgtgtacattcaactcagagagttgaacgttccattagacagagcagatttgaaacactctttttgtgcaattggcaagtggagatttcaagcgctttaaggtcaatggcagaaaaggaaatatcttcgtttcaaaactagacagaatcattcccacaaactgcgttgtgatgtgttcgttcaactcacagagtttaacctttctgttcatagagcagttaggaaacactctatttgtaaagtctgtaagtggatattctgacatcttgtggccttcgttggaaacgggatttcttcatattctgctagacagaagaattctcagaatcttccttgtgttgtgtgtattcaactcacagagttgaacgatcctttacacagagcagacttgaaacactctttttgtggaatttgcaagtggagatttcagccgctttgaggtccatggtagaaaaggaaatatcttggtataaaaactagacagaatgattctcagaaactcctttgtgatgtgtgcgttcaactcacagagtttaacctttcttttcatagagcagttaggaaacactctgtttgtaaagtctgcaagtggatattcagacctccttgaggccttcgttggaaacgggatttcttcatattatgttagacagaagaattctcagtaacttcctggtgttgtgtgtattcaactcacagagttgaacgatcctttacacagagcagacttgaaacactctttttgtggaatttgcaagtggagatttcagccgctttgaggtcaatggtagaataggaagtatcttcctatagaaactagacacaatgattctcagaaactcctttgtgatgtgtgcattcaactcacagagtttaacttttcttttcatagagcagttaggaaacactctgtttgtaaagtctgcaagtggatattcagacctctttgacgccttcgttggaaacgggatttcttcatattctgctagacagaagaattcccagtaacttccttgtgatgtgtgtgttcaactcacagagttgaactttcatttacacagagcagatttgaaacactctttttgtggaatttgcaaatggagatttcaagcgctttgaggccaaaggcagaaaaggaaatatcttcgtataaaaactagacagaatcattctcagcaaactgctctgcgatgtgtgcgttcaactctcagagtttaacttttcttttcattcagcagtttggaaacactctgtttgtaaagtctgcacgtggataatttcaccacttagaggtcttcgttggaaacgggtttttttcatgtaaggatagacagaagaattcccagtaacttccttctgttgtgtacattcaactcacagagttgaacgttcccttagacagagcagatttgaaacactctttttgtgcaattggcaagtggagatttcaagcgctttaaggtcaatggcagaaaaggaaatatcttcgtttcaaaactagacagaatcattcccacaaactgcgttgtgatgtgttcgttacctcacagagtttaacctttcttttcatagagtagttaggaaacactcagtttgtaaagcctgcaagtggatattcagacctctttgaggccttcgttggaaacgggatttcttcatattatgctagacagaagaattctcagtaacttccttgtgttgtgtgtattcaactcatggagttgaacgatcctttacacagagcagacttgtaacactctttttgtggaatttgcaagtggagatttcagccactttgaagtcaaaggtagaaaaggaaataacttcctataaaaactagacagaatgattctcagaaactcctttgtgatgggtgcgttcaactcacagagtttaacctttcttttcatagagcagttaggaaacactctgtttgtaaagtctgcaagtggatattgagacatctttgaggccttcgttggaaacaggatttcttcatattctgatagacagaagaattctcagtaacttccttgtgttgtgtgtattcaactcacagagttgaacgatcctttacacagagcagtcttgaaacagtctttttgtggattttgcaagtgcagatttctgccgctttgaggtcaatggtagaataggaaatatcttcctatagaaactagacagaatgattctcagaaactcctttgtgatgtgtgcgttcaactcacagagttcaacctttcttttcatagagcagttgggaaacactctgtttgtaaagtctgcaagtggattttcagacttctttgaggccatcgttggaagcgggatttcttcatattctgctagacagaagaattctcagaatcttccttgtgttgtgtgtattcaactcacagagttgaacgatcctttacacagagcagacttgaaacactctttttgtggaatttgcaagtggagatttcaagcgctttgaggccaaaggcagaataggaaatatcttcgtataaaaactagacagaatcattctcagaaactgctctgtgatgtgtgcgttcaactctcagagtttaacttttcttttcattcagcagtttggaaacactctgtttgtaaagtctgcacgtggatattttgcccacttagaggccttcgttggaaacgggtttttttcatgtaagggtagacagaagaattcccagtaacttccttgtgttgtgtacattcaactcacagagttgaacgttcccttagacagagcagatttgaaacactctttttgtgcaattggcaaatggagatttcaagcgctttaagttcaatggcagaaaaggaaatatcttcgtttcaaaactagacagaatgattctgagaaactcctttgtgatgtgtgcgttcaactcacagagtttaacctttcttttcaaagagcagttaggaaacactctgtttgtaaactctgcaagtggatattcagacctccttgaggccttcgttggaaacggggtttcttcctattatgctagacagaagaattctcagtaacttccttgtgttgtgtgtattcaactcaaagagttgaacgatcctttacacagagcagagtagaaacactctttttgtggaatttgcaagtggagatttcagactctttgaggtcaatggtagaataggaaatatcttcctatagaaactagacagaatgattctcagaaacttctttgtgatgtgtgcgttcaactcacagagtttaacctttcttttaatagagcagttaggaaacactctgtttgtaaactctgcaagtggatattcagacctctttgaggccttcgttggaaacgggatttcttcatactatgctagacagaagaattctcagtaacttccttgtattgtgtgtattcaactcacagagttgaacgatcctttacacagagcagacttgtaacacactttttgtggaatttgcaagtggagatttcagccgctttgaagtcaaaggtagaaaaggaaatatcttcctataaaaactagacagaatgattctcatgaactccattgtgatgtgtgcgttcaactcacagagtttaacctttcttttcatagagcagttaggaaacactctgtttgtaaagtctgcaagtggatattcagacctccttgaggccttcgttggaaaagggatttcttcatattctgctagacagaagaattctcagtaacttccttgtgttgtgtgtattcaactgacagagctgaactttcatttagagagagcacatttgaaacactgtttttgtggaatttgcaagtggagatttcaaacgctttggggccaaaggcagaaaaggaaatatcttcgtataaaaactagacagaatcattctcagaaactgctctgcgatgtgtgcgttcaactctcagagtttaacttttcttttcattcagcagtttggaaacactatgtttgtaaagtctgcacgtggatattttgaccacttagaggccttcgttggaaacgggtttttttcttgtaaggctagacagaagaattcccagtaacttccttgtgttgtgtacattcaactcacagagttgaacgttcccttagacagagcagatttgaaacactctttttgtgcaattggcaaatggagatttcaagcgctttaagttcaatggcagaaaaggaaatatcttcgtttcaaaactagacagaatcattcccacaaactgcgttgtgatgtgttcgttcaactcacagagtttaacctttcttttcatagagcagttaggaaacagtctgtttgtcaattctgtaagtggatattctgacatcatgtggccttcgttggaaacgggatttcttcatattctgctagacagaagaattcccagtaacttccttgtgttgtgtgtattcaactcacagagttgaacgatcctttacacagagcagacttgtaacactctttttgtggaatttgcaagtggagatttcagccactttgaagtcaaaggtagaaaaggaaataacttcctataaaaactagacagaaatgattctcagaaactcctttgtgatgtgtgcgttcaactcacagagtttaacctttcttttcatagagcagttaggaaacactgtgtttgtaaagtctgcaagtggatattcagacctctttgaggccttcgttggaaacgggtttttttcatataaggctagacagaagaattctcagaatcttccttgtgttgtgtgtattcaactcacagagttgaacgatagtttacacagagcagatttgaaacactcatttggtggaatttgcaagtggagatttcagccgctttgaggtaaatggtagaaaaggaaatatcttcgtataacaactagacagaatgattctcagaaactcctttgtgatgtgtgcgttcaactcacagagtttaacctgtcttttcatagagcagttaggaaacactctgtttgtaaagtctgcaagtggatattcagacatccttgaggctttcgttggaaacgggatttcttcatattctgctagaaagaagaattcccagtaacttcccttgtgttgtgtgtgttcaactcacagagttgaactttcatttagacagagcagatttgaaacactctttttgtggaatttgcaaatggagatttcaagcgctttgaggccaaaggcagaaaaggaaatatcttcgtataaaaactagacagaatcattctcagaaactgctgcgagatgtgtgcgttcaactctcagagtttaacttttcttttcattcagcggtttggaaacactgtgtttgtaaagtctgcacgtggatattttgaccacttagaggccttcgttggaaacgggtttttttcatgtaaggctagacagaagaattctcagtaacttccttgtgttgtgtgtattcaactcacagagttgaacgatcctttacacagagcagacttgaaacactctttttgtggaatttccaagtggagatttcagccgctttgaggtcaatggtagaaaaggaaatatcttcgtataaagactagacagaatgattctcagaaactcctttgtgatgtgtgcgttcaactcacagagtttaacttttcttttcatagagcagttaggaaacactctgtttgtaaagtctgcaagtggatattcagacctctttgaggccttcgttggaaacgagatttcttcatattctgctagacagaagaattctcagtaacttccttgtgttgtgtgtattcaactgacagagttaaactttcatttagagagagcagatttgaaacactgtttttgtggaatttgcaagtggagatttcaagcgctttgtggccaaaggtagaaaaggaaatatcttcgtataaaaactagacagaatcattctcagaaactgctctgcgatgtgtgcgttcaactctcagagtttaactttgcttttcattcagcagtttggaaacactctgtttgtaaagtctgcacgtggataacttgaccacttagaggccttcgttggaaacgggtttttttcatgtaaggctagacagaataattctcagtaacttccttgtgttgtgtgtattcaactcacagagttgaacgatcctttacagagagcagaattgaaacactctttttgtggaatttgcaagtggagatttcagccgctttgaggtcaatggtagaataggaaatatcttcctatagaaaatagacagaatgattctcataaactcctttgtgatgtgtgcgttcaactcacagggtttaacctttcttttcatagagcagttaggaaacactctgtttgtaaagtctgcaagtggatattcagacctactttgaggccttcgatggaaacgggattttttcatattctgctagacagaagaattcccagtaacttccttgtgttgtgtgtgttcaactcacagagttgaactttcatttacacagagcagattggaaacattctttttgtggaatttgcaagtggagatttcaagcgctttgaggtcaaaggcagaaaaggaaatatcttcgtataaaaactagacagaatcattctcagaaactgctctgcgatgtgtgcgttcaactctcagagtttaacttttcttttcattcagcattttggaaacactctgtttgtaaagtctgcacgtggatattttgaccacttagaggccttcgttggaaacgggtttctttcctgtaaggctagacagaagaattcgcagtaacttcccttgtgttgtgtacattcaactcacagagttgaacgttcccttagacagagcagatttgaaacagtctttttgtgcaattggcaagtggagatttcaagcgctttaagttcaatggcagaaaaggaaatatcttcgtttcaaaactagacagaatcattcccacaaactgcgttgtgatgtgttggttcatctcacagagtttaacctttcttttcatagagcagttaggaaacactctgtttgtaaattctgtaagtggatattctgacatcttgtggccttcgttggaaacgggatttcttcaaattctgctagacagaagaagtctcagtaacttccttgtgttgtgtgtattcaactcacagagttgaacgatactttacacagagcagacttgaaacactctttttgtggaatttgcaactggagatttcagccgctttgaggtcaatggtagaataggaaatatcttcctatagaaactagacagaatgattctcagaaactcctttgtgatgtgtgcgttcaactcacagagtttaacttttcttttcatagagcagttaggaaacactctgtttctaaggtctgcaagtggatattcagacctctttgacgccttcgttggaaacgggatttcttcatattctgctagacagaagaattctcagtaacttccttgttttgtgtgtattcaactcacagagttgaaccatcctttacacagagcagacttgaaacactctttttgtggaatttgcaagtggagatttcagccgctttgagctcaatggtagaataggaaatatcttcctatagaaactagacagaatgattctcataaactcctttgtgatgtgtgcgttcaaatcacagagtttaacctttcttttcatagagcagttagtaaatactctgtttataaagtctgcaagtggatattcagacccctttgaggccttcgttggaaacgggatttcttcatattatgctagacagaagaattcccagtaccttccttgtgttgtgtgtgttcaactcacagagttgaactttcatttacacagagcagatttgaaacactctttttgtggaatttgcaggtggagatttcaagcgctttgaggccaaaggcagaaaaggaaatatcttcgtataaaaactagacagaatcattctcagaaactgctgcgtgatgtgtgcgttcaactctcagagtttaacttttcttttcattcagcggtttggaaacactctgtttgtaaagtctgcacgtggacattttgaccacttagaggccttcgttggaaacgggtttttttcatgtatggctagacagaagaattcccagtaacttccttgtgttgtgtacattcaactcacagagttgaacgttcccttagacagagcagatttgaaacactctttttgtgcaattggcaagtggtgatttcagccgctttgaggtcaatggtagaaaaggaaatatcttcgtataaaaactagacagaatgattctcagaaacttcattgtgacgtgtgcgttcaactcacagagtttaacctttcttttcatagagcagttaggaaacactctgtttgtaaagtctgcaagtggatattcggacctctttgaggtcttcgttggaaacgggatttcttcatactgtgctagacagaagaattctcagtaacttccttgtgttgtgtgtattgaactcgcagagttgtacgatcctttacacagagcagacttgaaacactctttttgtggaatttgcaagtggagatttcagccgctttgaggtcaatagtagaaaaggaaatatcttcgtagaaaaactagacagaatgattctcagaaactcctttgtgatgtgtgtgttcaactcacagagtttaacctttcttttcatggagcagttaggaaacactctgtttgtaaagtctgcaagaggatattcagacctctttgaagccttcgttggaaacgggtttttttcatataaggctagacagaagaattctcagtaacttccttgtgttgtgtgtattcaactcacagagttgaacgatcctttacagagagcagacttgaaacactctttttgtggaatttgcaaggggagatttcagccgctttgaggtcaatagtagaaaaggaaatatcttcgtataaagactagacagaatcattctcagaaaatgctctgtgatgtgtgcgttcaactctcagagtttaacttttcttttcattcagcactttggaaacactctgtttgtaaagtctgcacgaggatattttgaccacttagaggtctttgttggaaacgggtttttttcacgtaaggctagacagaagaattcccagtaactttccttgtgttgtgtacattcaactcacagagttgaacgttcccttagacagagcagatttgaaacactctttttgtgcaattggcaagtggagatttcaagggctttaaggtcaatggcagaaaaggaaatatcttcgtttcaaaactagacagaatcattcccacaaactgcgttgtgatgtgttcgttcaactcacagagtttaacctttctgttcatagagcagttaggaaacactctgtttgtaaagtctgcaagtggatattcagacttccttgaggccttcgttggaaacgggatttcttcatattctgctagacagaagaattctcaggaacttccttgtgttgtgtgtattcaactcacagagttgaacgatcctttacacagagcagacttgaaacactctttttgtggaatttgcaagtggagatttcagccgctttgaggtcaatggtagaaaaggaaatatcttcctatagaaactagacagaatgattctcagcaaacttctttgtgatgtgtgcgttcaactcacagagtttaacctttcttttcatagagcagttaggaaacactctgtttgtaaactctgcaagtggatattcagacctctttgaggccttcgttggaaacgggatttcttcatactatgctagacagaagaattctcagtaactcccttgtgttgtgtgtattcaactcacagagttgaacgatcctttacacagagcagacttgaaacactctttttgtggaatttgcaagtggagatttcagccgctttgagttcaatggtagaataggaaatatcttcctatagaaactagacagaatgattctcagaaactcctttgtgatgtgtgcgttcaactcacagaggttaacctttcttttcatagagcagttaggaaacactctgtttgtaaagtctgcaagtggatatgcagacctccttgaggcctttgttggaacgggatttcttcatattatgctatacagaagaattctcagaaacttccttgtgttgtgtgtattcaactcacagagttgaacgatcctttacacagagcattcttgaaacactcttcttgtggaatttgcaagtggagatttcagccgctttgaggtcaatggtagaataggaaatatcttcctatagaaactagacagaatcattctcagaaactgctctgtgatgtgtgcgttcaactctcagagtttaacttttcttttcattcagcagtttggaaacactctgttcgtaaagtctgcacgtggataatttgaccacttagaggccttcgttggaaacgggtttttttcatgtaaggctagacagaagaattcccagtaacttccttgtgttgtgtacattcaactcacagagttgaacgttcccttagacagagcagatttgaaacactctttttgtgcaattggcaagtggagatttcaagagctttaaggtcaatggcagaaaaggaaatatcttcgtttcaaaactagacagaatgattctcagaaactcctttgtgatgtgtgcgttcaactcacagagtttaacctttctgttcatagagcagttaggaaacactctgtttgtaaagtctgtaagtggatattctgacatcttgtggccttcgttcgaaacgggatttcttcatattctgctagacagaagaattctcagtaacttccttgtgttgtgtgtgttcaactcacagagttgaacgatcctttacacagagcagacttgtcacactctttttgtggaatttgcaagtggagatttcagccgctttgaagtcaaaggtagaaaaggaaatatcttcctataaaaactagacagaatgattctcagaaactcctttgtgatgtctgcgttcaactcacagagtttaacctttcttttcatagagaagttaggaaacactctgtttgtaaagtctgcaagtggatattcagacctctttgaggccttcgttggaaacgggtttttttcatataaggctagacagaagaattctcagaaacttccttgtgttgtgtgtattcaactcacagagttgaacgatcatttacacagagcagacttgaaacacactttttttggtattttcaatgggagatttcagccgcttttaggtcaatggtagaaaaggaaatatcttcgtataaagactagacagaatgattctcagaaactcctttgtgatgtgtgcgttcaactcacagagtttaacctttcttttcatagagcagttaggaaacgctctgtttgtaaagtctgcaaggggatattcagacctctctgaggccttcgttggaaatgggatttcttcatattatgctagacagaagaattctcagtaacttccttgtgttgtgtgtattcaactgacagagttgaactttcatttagagagagcagatttgaaacactgtttttgtggaatttgcaagtggagatttcaagcgctttggggccaaagccagaaaaggaaatatcttcgtataaaaactagacagaatcattctcagaaactgctctgcgatgtgtgcgttcaactctcagagtttaactattcttttcattcagcagtttggaaacaatctgtttgtaaagtctgcacgtggataacttgaccacttagaggccttcgttggaaacgggtttttttcatgtaaggctagacagaagaattctcagaaacttccttgtgttgtgtgttttcaactcacagagttcaacgatcctttacacagagtagacttgaaacactgtttttgtggaattggcaagtggagatttcagccgctttgaggtcaatggtagaataggaaatatcttcgtataaaaactagacagagaatgattctcagaaactcctttgtgatgtgtgtgttcatctcacagagtttaacctttcttttcatagagcagttagtaaacactctgtttataaagtctgcaagtggatattcagacccctttgaggccttcgttggaaacgggatttcttcatattatgctagacagaagaattcccagtaacttccttgtgttgtgtgtgttcaactcacagagttgaactttcatttacacagagcagatttgaaacactctttttgtggaatttgcaagtggagatttcaagcgctttgaggccaagggcagaaaaggaaatatcttcgtataaaaactagacagaatcattctcagaaactgctctgcgatgtgtgcgttcaactctcagagtttaacttttcttttcattcagcagtttggaaacactctgtttgtaaagtctgcacgtgcataatttgaccacttagaggccttcgttggaaacgggtttttttcatgtaaggctagacagaagaattctcagtaacatccttgtgttgtgtgtattcaactcacagagttgaacgatcctttacacagagcagacttgaaacactctttttgtggaatttgcaagtagagatttcagccgctttgaggtcaatggtagaataggaaatatcttcctatagaaactagacagagtgattctcagaaactcctttgggatgtctgcgttcaactcacagagtttaacctttcttttcatagagcagttaggaaacactctgtttgaaaagtctgcaagtggatattcagacctccttgaggccttcgttggaaacgggatttcttcatattctgctatacagaagaattctcagcaacttccttgtgttgtgtgtattcaactcacagagttgaacgatcgtttacacagagcagacttgagacactctttttgtggaatttgcaagtggagatttcagcctctttgaggtcaatggtagaaaaggaaatatcttcatgtaaaaactagacagaatcattctcagaaactgctgcgtgatgtgtgcgttcaactctcagagtttaacttttcttttcattcagcggtttggaaacactctgtttgtaaagtctgcacgtggatattttgaccacttagaggccttcgttggaaacggatttttttcatgtaaggctagacagaagaattcccagtaacttccttgtgttgtgtacattcaactcacagagttgaacgttcccttagacagagcagatttgaaacactctttttgtgcaattggcaaacggagatttcaagcgctttaagttcaatggcagaaaaggaaatatcttcgtttcaaaactagacagaatcattcccacaaactgcgttgtgatgtgttcgttcaactcacagagtttaacctttcttttcatatagcagttaggaaacactctgtttgtaaagtctgcaagtggatattcagacctctttgaggccctcgttggaaacgggatttcttcatattatgctagacagaagaattctcagtaacttccttgtgttgtgtgtattcaactcacggagttgaacgatcctttacacagagcagacttgtaacactctttttgtggaatttgcaagtggagatttcagccgctttgacgtcaatggtagaaaaggaaataccttcgaataaaaactagacagaatgattctcagaaactcctttgtgatgtgcgcgttcaactcacagagtttaacctttcttttcatagagcagttaggaaacactctgtttgtaaagtctgcaagtggatattcagacatccttgaggctttcgttggaaacgggatttcttcatattctgctagaaagaagaattctcagtaacttccttgtgttgtgtgtattcaactcacagagttgaacgatcctttacacagagcagacttgaaacactctttttgtggaatttgcaagtggagatttcaagcgctttgaagccaaaggcagaaaaggaaatatcttcgtataaaaactagacagaatgattctcagaaactcctttgtgatgtgtgcgttcaagtcacagagtttaacctttcttttcatagagcagttaggaaacactctgtttgtaaagtctgcaagtggatattcagacctctttgaggccttcgttggaaacgggatttcttcatattctgctagacaaaagaatttctcagtaacttcccttgtgttgtgtgtattcaactgacagagttgaactttcatttagagagagcagatttgaaacactgtttttgtggaatttgcaaatggagatttcaagcgctttggggccaaaggcagaaaaggaaatatcttcgtataaaaactagacagaatcattctcagaaactgctgcgtgatgtgtgcgttcaactctcagagtttaacttttcttttcattcagcggtttggaaacactctctttgtaaagtctgcacgtggatattttgaccacttagaggccttcgttggaaacgggttttcttcatgtaaggctagacagaagaattcccagtaacttccttgtgttttgtacattcaacccacagagttgaacgtttccttagacagagcagatttgaaacactctttttgtgcaattggcaattggtgatttcagccgctttcaggtcaaaggtagaaaaggaaatatcttcctataaaaactagacagaatcattcccacaaactgcgttgtgatgtgttcgttcaaatcacagagtttaacctttctgttcatagagcagttaggaaacactctgtttgtaaagtctgcaagtagatattgagacctcctagaggccttcgttggaaacgggatttcttcatattctgctagacagaagaattctcagtaactcctttgtgttgtgtatattcaactcacagagttgaacgatcctttacacagagcagacttgaaacactctttttgtggaatttgcaagtggagatttcagcctctttgaggtcaatggtagaataggaaatatcttcctatagaaactagacagaatgattctcagaaactcctttgtgatgtgtgcgttcaactcacagagtttaacctttcttttcatagagcagttaggaaacactctgtttgtaaagtctgcaagtggatattcagacctccttgaggccttctttggagacgggatttcttcatattatgctagacagaagaattcccagtaacttccttgtgttgtgtgtgttcaactcacagagttgaactttgatttacacagagcagatttgaaacactctttttgtggaatttgcaagtggagatttcaagcgctttgaggccaaaggcagaaaaggaaatatcttcgtataaaaactagacagcatcattctcagaaactgctctgcgatgtgtgcgttcaactctcagagtttaacttttcttttcattcagcagtttggaaaccctctgtttgtaaagtctgcacgtggatattttgaccatttagaggctttcgttggaaacgggtttttttcttgtaaggctagacagaagaattcccagtaacttcccttgtgttgtgtgcattcaactcacagagttgaacgttcccttagacagagcagatttgaaacactctatttgtgcaatttgcaagtgtagatttcaagcgctttaaggtcaatggcagaaaaggaaatatcttcgtttgaaaactagacagaatgattcccacaaactgcgttgtgatgtgttcgttcaactcacagtagtttaacctttctgttcatagagcagttaggaaacactctgtttgtaaagtctgtaagtggatattctgacatcttgtggccttcgttgggaacgggatttcttcatattctgctagacagaagaattctcagtaacttccttgtgttgtgtgtattcaactcacacagttgaacgatcctttacacatagcagacttgtaacactctttttgtggaatttgcaagtggagattcctgccgctttgaagtcaaatgtagaaaaggaaatatcttcctataaaaactagacagaatgattctcagaaactcctttgtgatgtgtgcgttcaactcacagagtttaaccttacttttcatagagcagttaggaaacactctgtttgtaaagtctgcaagtggatatacagacatctttgaggccttcgttggaaacgggatttcttcatgttctgctagacagaagaattctcagtaacttccgcgtgttgtgtgtattgaactcacagagttgaacgatcctttacacagagcagagttgaaacactctttttgtggaatttgcaagtggagatttcagccgctttgaggtcaatggtagaaaaggaaatatcttcctataaaaactagacagaatgattctcagaaactcctttgtgatgtgtgcgttcaactcacagagttcaaactttcttttcatagagcagttgggaaacactctgtttgtaaagtctgcaagtggatattcagacttctttgaggacttcgttggaagcgggatttcttcgtattctgctagacagaaaaattcccagtaacttccttgtgttgtgagtgttcaactcacagagttgaactttcatttacacagagcagatttgaaacactctttttgtggaatttgcaagtggagatttcaagcgctttgaggccaaaggcagaaaaggaaatatcttcttataaaaactagacagaatcattctcagaaactgtggcgtgatgtgtgcgttcaactctcagagtttaacttttcttttcattcagcggtttggaaacactctgtttgtaaagtctgcacgtggatattttgaccacttagaggccttcgttggaaacggggttttttcatattctgctagacagaagaattcccagtaacttccttgtgttgtgtacattcaactcacagagttgaacgttcccttagacagagcagatttgaaacactctttttgtgcaattggcaaatggagatttcaagcgctttaaggtcaatggcaggaaaggaaatatcttcgtttcaaaactagacagaatcattcccacaaactgcgttgttatgtgttcgttcaactcacagtagtttaacctttcttttcatagagcagttaggaaacagtctgtttgtaaattctgtaagtggatattctgacatcttgtggccttcgttggaaacgggatttcttcatattctgctagacagaagaattctcagtaaattcctggtgttgtgtgtattcaactcacagagttgaacgatcctttacacagagcagacttgaaacactctttttgtggaatttgcaagtggagatttcagccgctttgaggtcaattgtagaaaaggaaatatcttcgtatagaaactagacagaatgattctcagaaacttctttgtgatgtgtgcgttcaactcacagagtttaacctttcttttcatacagcagttaggaaacactctgtttgtaaactctgcaagtggatattcagacctctttgaggccttcgttggaaacgggatttcttcatactatgctagacagaagaattctcagtaacttccttgtgttgtgtgtattcaactcacagagttgaacgatgatttacacagagcagacttgaaacactctttttgtggaatttgcaactggagatttcagccgctgtgtggtcaatggtagaataggaaatatcttcctatagaaactagacagaatgattctcagaaactgctttgtgctctgtgcgttcaactcacagagtttaacctttcttttcatagagcagttaggaaacactctgtttgtaaagtctgcaagtggatattctgacctctttggggccttcgttggaaaagggatttcttcatattatgctagacagaagaattcccagtaacttccttgtgttgtgtgtgttcaactcacagagttgaactttcatttacacagagcagatttgaaacactctttttttggaatttgcaagtggagatttcaagcgctgtgaggccaaaggcagaaaaggaaatatcttcgtataaaaactagacagaatcattctcagaaactactctgcgatgtgtgcgttcaactctcagagtttaacttttcttttcattcagcagtttggaaacactctgtttgtaaagtctgcacgtggatattttgaccacttagaggccttcgttggaaacgggtttttttcctgtaaggctagacagaagaattcccagtaacttccttgtgttgtgtacattcaactcacagagttgaacgttcccttagacagagcagatttgaaacactctttttgtgcaattggcaaatggagatttcaagcgctttaaggtcaatggcaggaaaggaaatatcttcgtttcaaaactagacagaatcattcccacaaactgcgttgtgatgtgttcgttcaactcacagagtttaacctttctgttcatagagcagttaggaaacactctgtttgcaaagtctgcaagtggatattcagacctccttgaggccttcgttggaaacgggatttcttcatattctgctagacagaagaattctcagaatcttccttgtgttgtgtgtattcaactcacagagttgaacgatggtttacacagagcagatttgaaacactctatttgtggaatttgcaagtggagatttcagccgctttgaggtccatggtagaaaaggtaatatcttcgtataaaaactagacagaatgattctcagaaactcccttgtgatgtgtgcgttcaactcacagagtttaacctttcttttcatagagcagttaggaaacactctgtttgtaaagtctgcaagtggatattcagacctccttgaggccttcgttggaaacgggatttcttcatatgatgctagacagaagaattctcagtaacttccttgtgttgtgtgtattcaactcacagagttgaacgatcctttacacagagcagacttgaaacactctatttgtggaatttgcaagtggagatttcagccgctttgaggtcaatggtagtataggaaatatcttcctatagaaactagacagaatgattctcagaaactcctttgtgatgtgtgcagttcaactcacagagtttaacctttcttttcatagagcagttaggaaacactctgtttgtaaagtctgcaagtggatattcagacctccttgaggccttcgttggaaacgggatttcttcctattatgctagacagaagaattcccagtaacttccttgtgttatgtgtgttcaactcacagagttgaactttcatttacacagagcagatttgaaacactctttttgtggaatttgcaagtggagatttcaagcgctttgaggccaaaggcagaaaaggaaatatcttcgtataaaaactagacagaatcattctcagaaactgctctgcgatgtgtgcgttcaactctcagagtttaacttttcttttcattcagaagtttggaaacactctgtttgtaaagactgcacgtggataacttgaccacttagaggccttcgttggaaacgggtttttttcatataaggctagacagaagtattcccagtaacttccttgtgttgtgtgcattcaactcacagagatgaacgttcccttagacagagcagatttgaaacactctatttgtgcaatttgcaagtgtagatttcaagcgctttaaggtcaatggcagaaaaggaaatatcttcgtttcaaaactagacagaatcattcccacaaactgcgttgtgatgtgttcgttcaactcacagagtttaacctttccgttcatagagcagttaggaaacactctgtttgtaaagtctgtaagtggatattctgacatcttctggccttcgttggaaacgggatttcttcatattctgctagacagaagaattctcagaatcttccttgtgttgtgtgtattcaactcacagagttgaacgatggtttacacacagcagatttgaaacactctttttgtggaatttgcaagtggagatttcagcctctttgaggtcaatggtagaaaaggaaatatcttcgtataaaaactagacagaatgattctcagaaacttctttgtgatgtgtgcgttcaactcacagagtttaacctttcttttcatagagcagttaggaaacactctgtttgtaaagtctgcaagtggatattcagacctctttgaggccttcgttggaaacgggatttcttcatgctatgctagacagaagaattctcagtaacttccttgtgttgtgtgtattcaactcacagagttgaacgatcctttacacggagcatacttgaaacactcttgttgtggaatttgcaagtggagatttcagcctctttgaggtcaatggtagaataggaaatatcttcctatagaaactagacagaatgattctcagaaactcctttgtgatgtgtgcgttcaactcacagagtttaacttttcttttcatagagcagttaggaaacactctgtttgtaaggtctgcaagtggatattcagacctctttgaggccttcgttggaaacgggatttcttcatattatgctagacagaagaattctcagtaacttccttgtgttgtgtgtattcaactgacagagttgaactttcatttagagagagcagatttgaaacactgtttttgtggaatttgcaagtggagatttcaagcgctttggggccaaaggctgaaaagggaatatcttcgtataaaaactagacagaatcattctcagaaactgctgcgtgatgtgtgcgttcaactctcagagtttaacttttcttttcattcagcggtttggaaacactctgtttgtaaagtctgcacgtggatattttgaccacttagaggccttcgttggaaacgggtttttttcatgtaaggctagagagaagaattcccagtaacttcccttgtgttgtgtacattcaactcacagagttgaacgtttccttagacacagcagatttgaaacactctttttgtgcaattggcaagtggtgatttcagccgctttgaggtcaatggtataaaaggaaatatcttcatataaaaactagacagaatcattcccacaaactgcgttgtgatgtgtttgttcaactcacagagtttaacctttcttttcatagagcagttaggaaacagtctgtttgtcaattctgtaagtggatattctgacatcttgtggccttcgttggaaacgggatttcttcatattctgctagacagaagaattctcagtaacttccttgtgttgtgtgtattcaactcacagaattgaacgatcctttacacagagcagacttgaaaaactctttttgtggaatttgcaagtggagatttcagccgctttgaggtcaatggtagaataggaaatatcttcctatagaaactagacagaatcattcccacaaactgcgttgtgatgtgttcgttcaactcacagagtttaacctttctgttcatagagcagttaggaaacactctctttgtaaagtccgtaagtggatattctgacatcttctggccttcgttggaaacgggatttcttcatattccgctagacagaagaattctcagtaacttccttgtgttgtgtgtattcaactcacagagttgaacgatcctttacacagagcatagttgaaacactctttttgtggaatttgcaagtggagatttcagccgctttgaggtcaatggtagaaaaggaaatatcttcgtataaagactagacagaatgattctcagaaacccctttgtgatgtgtacgttcaactcacagagtttaacctttcttttcatagagcagttaggaaacactctgtttgtaaagtctgcaagtggatattcagacctctttgaggccttcgttggaaacgggatttcttcatattctgctagacagagaattcccagtaacttccttgtgttgtgtgtgttcaactcacagagttgaactttcatttacacagagcagatttgaaacactctttttgtggaatttgcaggtggagatttcaagcgctttggggccaaaggcagaaaaggaaatatcttcgtataaaaactagacagaatcattctcagaaactactctgtgatgtgtgcgttcaactctcagagtttaacttttcttttcattcagcagtttggaaacactctgtttgtaaagtctgcacgtggatattttgaccacttagaggccttcgttggaaacgggtttttttcatttaaggctagacagaagaattcccagtaacttccttgtgttgtgtatattcaactcacagagttgaacgatcccttagacagagcagatttgaaacactctttttgtgcaattggcaagtggagacttcaagcgctttaaggtcaatggcagaaaaggaaatatcttcgtttcaaaactagacagaatcattcccaaaaactgcgttgtgatgtgttcgttcatctcagagagtttaacctttcttttcatagagcagttaggaaacagtctgtttgtaaattctgtaagtggatattctgacatcttgtggccttcgttggaaacgggatttcttcatattctgctagacagaaaggaattctcagtaacttccttgtgttgtgtttattcaactcacagagttgaatgatcctttacacagagcagacttgaaacactctttttgtggaatttgcaagtggagatttcagccgctttgaggtcaatggtagaaaagtaaatatcttcgtataaagactagacagaatgattctcagaaactcctttgtgatgtgtgcgttcaactcacagagtttaacctttcttttcatagagcagttaggaaacactctgtttgtaaagtctgcaagtggatattcagacctctttgaggctttccttggaaacgggagttcttcatattctgctagacagaagaattctcagtaacttccttgtgttgtgtgtattcaactcacagagttgaacgatcctttacacagagcagacttgaaacactgtttttgtggaatttgcaagtggagatttcggccgcgttgaggtcaaaggtagaaaagggaatatcttcgtaaagaaactagacagaatgattctcagaaactcctttgagatgtgtgtgttcaactcacagagtttaacctttcttttcatagagcagttaggaatcactctgtttgtaaagtctgcaggtggatattcagacctctttgaggccttcgttggaaacgggtttttttcatataaggctagacagaagaattctcagtaacttccttgtgttgtgtgtattcaactgacagagttgaactttcatttagagagagcagatttgaaacactgtttttgtggaatttgcaagtggagatttcaagcgctttggggccaaaggcagaaaaggaaatatcttcgtataaaaacgagacagaatcattctcagaaactgctctgcgatgtgtgcgttcaactctcagtagtttaacttttcttttcattcagcagtttggaaacactctgtttgcaaagtctgcacgtggatattttgaccacttagaggccttcgttggaaacgggtttttttcatgtaaggctagacagaagaattctcagtaacttccttgtgttgtgtgtattcaactcacagagttgaacgatcctttacacagagcctacttgaaacactgtttttgtggaatttgcaagtggagatttcagccgctttgaggtcaatggtagaaaaggaaatatcttcctatagaaactagacagaatgattctcagaaactcctttgtgatgtgtgcgttcaactcacggagtttaacctttcttttcatagagcagttaggaaacactctgtttgtaaagtctgcaagtggatattcagacctctttgaggccttcgttggaaacgggatttcttcatattctgatagacagaagaattcccagtaacttccttgtgttgtgtgtgttcaactcacagagttgaactttgatttacacagagtagatttgaaacactctttttgtggaatttgcaagtggagatttcaagcgctttgaggccaaaggcagaaaaggaaatatcttcgtataaaaactagacagaatcattctcagaaactgctgcgtgatgtgtgcgttcaactctcacagtttaacttttcttttcattcagcggtttggaaacactctgtttgtaaagtctgcacgtggatattttgaccacttagaggccttcgttagaaactggtttttttcatgtaaggctagacagaagaattcccagtaacttccttgtgttgtgtgcattcaactcacagagatgaacgttcgcttggacagagcagatttgaaacactctatttgtgcaatttgcaagtgtagatttcaagggctttaaggtcaatggcagaaaaggaaatatcttcgttccaaaactagacagaatcattcccactaactgcgttgtgatgtgttcgttcatctcacagagtttaacctttcttttcgtagagcagttaggaaacagtctgtttgtaaattctgtaagtggatattctgacatcttgtggccttcgttggaaacgggatttcttcatattctgctagacagaagaattctcagtaacttcattgtgttgtgtgtattcaactcacagacttcaacgatcctttacacagagcagacttgaaacactctttttctggaatttgcaagtggagatttcagccgctttgaggtcaatggtagaataggaaatatcttcctatagaaactagacagaatgattctcagaaactcctttgtgatgtgtgcgttcaactcacagagttcaacctttcttttcatagagcagttggaaaacactctgtttgtaaagtctgcaagtggatattcaaacttctttgaggccttcgttggaagcgggatatcttcatattctgctagacagaagaattctcagtaacttccttgtgttttgtgtattcaactcacagagttcaacgatcctttacagagagcagacttgaaacactctttttgtggaatttgcaagtggagctttcagccgctttgaggtcaatggtagaaaaggaaacatcttcgtataaaaactagacagaatgattctcagaaactcctttgtgatgtgtgcgtgcaactcacagagtttaacctttcttttcatagagcagttaggaaacactgtgtttgtaaagtctgcaagtggatattcagacctccttgaggccttcgttggaaacgggatttcttcatattatgctagacagaagaattctcagtaacttccttgtgttgtgtgtattcaactgacagagttgaacattcatttagagagagcagatttgaaacactgtttttgtggaatttgcaagttgagatttcaagaggtttggggccaaaggcagaaaaggaaatatcttcgtataaaaactagacagaatcattctcagaaactgctgcgtgatgtgtgcgttcaactctcagagtttaacttttcttttcattcagcggtttggaaacactctgtttgtaaagtctgtaagtggatattttgaccccttagaggccttcgttggaaatgggtttttttcatgtaaggctagacagaagaattcccagtaacttccttgtgttgtgtgcattcaactcacagacttgaacgttcccttagacagagcagatttgaaacactctatttgtgcaatttgcaagtgtagatttcaagcgctttcaggtcaatggcagaaaaggaaatatcttcctttcaaaactagacagaatcattcccacaaactgcgttgtgatgtgttcgttcaactcacagagtttaacctttcttttcatagagcagttaggaaacactctggttgtaaagtctgcaagtggatattcagacctctttgaggccttcgttggaaacgggatttcttcatattctgctagacagaataattctcagtaacttcccttgtgttgtgtgtattcaactcacagagttcaacgatcctttacagagagcagacttgaaacactctttttgtggaattcgcaagtggagatttcagccgctttgaggtcaatggtagaaaaggatatatcttcgtataaagactagacagaatgattctcagaaactcctttgtgatgtgtgcgttcaactcacagagtttaacctttcttttcatagagcagttaggaaacactctgtttgtaaagtctgcaagtggatattcagagctccttgaggccttctttggaaacgggatttcttcatattatgctagacagaagaattctcagtaacttccttgtgttttgtgtattcaactcacagagttcaacgatcctttacacagagcagacttgaaacactctttttgtggaatttgcaagtggagatttcagccgctttgaggtcaatggtagaaaaggaaatatcttcgtataaaaactagacagacaatgattctcagaaactcctttgtgatgtgtgtgttcaactcacagagtttaacctttcttttcatagagcagttaggaaacactctgtttgtaaagtctgcaagaggatattcagacctctttgaggccttcgttggaaacgggtttttttcatataaggctagacagaagaattcccagtaacttccttgtgttgtgtgtgttcaactcagagagttgaactctcatttacacagagcagatttgaaacactctttttgtggaatttgcaagtggagatttcaagcgctttgaggcgaaaggcagaaaaggaaatatcttcgtataaaaactagacagaattattctcagaaactgctctgcgatgtgtgcgttcaactctcagagtttaacttttcttttcattcagcagtttggaaacactctgtttgtaaagtctgcacgtggataacttgaccacttagaggccttcgttggaaacgggtttttttcatgtaaggctagacagaagaattctaagtaacttcctcgtgttgtgtgtattcaactcacagagttgagcgacgctttacacagagcagacttgaaacactctttttgtggaatttgcaattggagatttcagccgctttgaggtcaatggttgaaaaggaaatatcttcgtttcaaaactagacagaatgattctcagaaactcctttgtgatgtgtgcgttcaactcacagaggttaacctttcttttcatagagcagttaggaaacactctgtttgtaatgtctgcaagtggagattcagacctgcttgaggccttcgttggaaacgggatttcttcatattatgctagacagaagaattctcagtaagttccttgtagtgtgtgtattcaactcacagagttaaacgatcctttacacagagcatacttgaaacactctttttgtggaatttgcaagtggagatttcagccgctttgaggtcaatggtagaataggaagtatctccctatagaaattagacagaatgattctcagaaactcctttgtgatgtgtgcgttcaactcacacagtttaacctttcttttcatagagcagttaggaaacactctgtaaagtctgcaagtggatattcagacctccttgaggccttcgttggaaacgggatttcttcatattatgctagacagaagagttctcagtaacttccttgtgttgtgtgtattcaactcacagagttgaacgatcctttacacagagcagacttgaaacactctttttgtggaatttgcaagtggagatttcagccgcgttgaggtcaatggtagaaaaggaaatatcttcgtataaaaactagacagaatgattctcagaaactcctttgtgatgtgtgtgttcaactcacagagtttaacctttcttttcatagagcagttaggaaacactctgcttgtaaagtctccaagtggatattcagccctctttgaggccatcgttggaaacgggtttttttcatataaggctagacagaagaattcccagtaacttccttgtgttgtgtgtgttcaactcacagagttgaactttcatttacacagagcaggtttgaaacactctttttgtggaatttgcaaatggagatttcaagcgctttgaggccaaaggcagaaaaggaaatatcttcgtataaaaactagacagaatcattctcagaaactgctgcgtgatgtgtgcgttcaactctcagagtttaacttttcttttcattcagcggtttggaaacactctgtttgtaaagtctgcacgaggatattttgaccccttagaggccttcgttggaaacgggtttttttcatgtaaggctagacagaagaattctcagtaacttccttgtgttgtgtgtattcaactcacagagttgaaggatcctttacagagagcaggattgaaaaactctttttgtcgaatttgcaagtggagatttcagccgctttgaagccaatggtagaataggaaatatcttcttatagaaactagacagaatgattctcagaaactcctttgtgatgtgtgcgttcaactcacagaggttaacctttcttttcatagagcagttaggaaacactctgtttgtaaagtctgcaagtggagattcagacctgcttgaggccttcgttggatacgggatttcttcatattatgctagacagaagaattcccagtaactcccttgtgttgtgtgtgttcaactcacagagttgaactttcatttacacagagcagatttgaaacactctttttgtggaatttgcaaatggagatttcaagcgctttgaggccaaaggcagaaaaggaaataacttcgtttcaaaactagagagaaatcattctcagaaactgctctgcgatgtgtgcgttcaactctcagcagtttaacttttcttttcattcagcagtttggaaacactctgtttgtaaagtctgcacgtggataatttgaccacttagaggccttcgttggaaacgggtttttttcatgtaaggctagacagaagaattcccagtaacttccttgtgttgtgtacattcaactcacagagttgaacgttcccttagacagagcagatttgaaacactctttttgtgcaattggcaagtggagatttcaagcgctttaaggtcaatggcagaaaaggaaatatcttcgtttcaaaactagagagaatcattcccacaaactgcgttgtgatgtgttcattcaactcacagagtttaacctttcttttcatagagcagttaggaaacagtctgtttgtaaattctgtaagtggatattctgacatcttgtggccttcgttggaaacgggatttcttcatattctgctagacagaagaattctcagaaacttccttgtgttgtgtgtattcaactcacagagttgaacgatcctttactcagagcagacttgaaacactccttttgtggaatttgcaagagaagatttcagccgcttttaggtcaatggtagaataggaaatatcttcctatagaaactagacagaatgattctcaaaaacttctttgtgatgtgtgcgttcaactcacagagtttaacctttcttttcttagagcagttaggaaacactctgtttgtaaactctgcaagtggatattcagacctctttgaggccttcgttggaaacgggatttcttcatactatgctagacagaagaattctcagaaagttcgttgtgttgtgtgttttcaactcacagagttcaacgatcctttacacagagtagacttgaaacaccctttttgtggaattggcagggtggagatttcagccgctttgaggtcaatggaagaaaaggaaatatcttcgtataaaaactagacagaatgattctcagaaaatcttttgtgatgtgtgtgttcaactcacagagtttaacttttcttctcatagagcagttaggaaacactctgtttgtaaagtctgcaagtggatattcagacctctttgaggccttcgttggaaacgggatttcttcatattatgctagacagaagaattctcagtaacttccttgtgttgtgtgtattcaactcacagagttcaacgatcctttacacagagcagacttgaaacactctttttgtggaatttgcaagtggagatttcagccgctttgaggtcaatggcagaaaaggaaatatcttcgtataaaaactagacagaatgattctcagaaactcctttgtgatgtgtgcgttcaactcacagagtttaacctttcttttcatagagcagttaggaaacactctatttgtacagtctgcaagtggatattcagacctccttgaggccttcgttggaaacgggatttcttcatattctgctagacagaagaattctcagtaacttccttgtgttgtgtgtattcaactcacagagttgaacgatcgtttacacagagcagacttgaaacattctttttgtggaatttgcaagtggagatttcagccgctttgtggtcaatggtagaataggaaatatcttcctatagaaactagacagaatcattctcagaaactgctctgcgatgtgtgcgttcaactctcagagtttaacttttcttttcattcagcagtttggaaacactctgtttgtaaagtctgcacgtggataacttgaccacttagaggccttcgttggaaaagggtttttttcatgtaaggctagacagaagaattctcagtaacttccttgtgttgtgtttattcaacacacagagttgaatgatcctttacccagagcagacttgaaacactctttttgtggaatttgcaagtggagatttcagccgctttgaggtcaatggtagaataggaaatatcttcttatagaaactagacaaaatgattctcagaaactcctttgtgatgtgtgcgttcaactcacagagtttaacctttctgttcatagagctgttaggaaacactctgtttgtaaagtctgcaagtggatattcagacctccttgaggccttcgttggaaacgggatttcttcatattctgctagacaggagtaattcccagtaacttccttgtgttgtgtgtgttcaactcatagagttgaactttgatttacacagagcagatttgaaacactctttttgtggaatttgcaagtggagatttcaagcgctttgaggccaaaggcagaaaaggaaatatcttcgtataaaaactagacagaatcattctcagaaactgctctgcgatgtgtgcgttcaactctcagagtttaacttttcttttcattcagaagtttggaaacactctgtttgtaaagtctgcacgtggataacttgaccacttagaggccttcgttggaaacgggtttttttcacgtaaggctagacagaagaattccgagtaacttccttgtgttgtgtgcattcaaatcacagagttgaacgttcccttagacagagcagatttgaaacactctatttgtgcaatttgcaagtgtagatttcaagcgctttaaggtcaatggcagaaaaggaaatatcttcgtttcaaaactagacagaaatcattcccacaaactgcgttgtgatgtgttcattcaactcacagagcttaacctttctgttcatagagcagttaggaaacactctgtttgtaaagtctgtaagtggatattctgacatcttgtggccttcgttggaaacgggatttcttcatattctgctagacagaagaattctcagtaacttccttgtgttgtgtgtattcacctcacagagttgaacgatcctttacacagagcagacgtgtaacactctttttgtgtaatttgcaagtggagatttcagccgctttgaagtcaaaggtagaaaaggaaatatcttcctataaaaactagacagaatgattctcagaaactcctttgtgatgtgtgcgttcaactcacagagtttaaccattcttttcatagagcagttaggaaaaactctgtttgtaaagtctgcaagtcgatattcagacctccttgaggccttcgttggaaacgcgatttcttcatattctgctagacagaagaattctcagtaacttccttgtgttgtgtgtattcaactcacagagttgaactatcctttacagagagcagacttaaaacactctttttgtggaatttgcaagtggagatttcagccgctttgaggtcaatagtagaaaagcaaatatcttcgtagaaaaactagacagaatgattctcagaaactcctttgtgatgtgtgcgttcaactcacagagtttaacctttcttttcttagagcagttaggaaacactctgtttataaagtctgcaagtggatattcagacctctttgaggccttcgttggaaacgggatttcttcatattctggtagacagaagaattcccagtaacttccttgtgttgtgtgtgttcaactcacagagttgaactttcatttacacagagcagatttgaaacactctttttgtggaatttgcaagtggagatttcaagcgctttgaggccaaaggcagacaaggaaatatcttcgtataaaaactagacagaatcattctcagaaactgctctgtgatgtgtgcgttcaactctcagagtttaacttttcttttcattctacagtttggaaacactctgtttgtaaagtctgcacgtggatattttgaccacttagaggccttcgttggaaacgggtttttttcatgtaaggctagacagaagaattcccagtaacttccttgtgttgtgtgcattcaactcacagagttgaacgttcccttagacagagcagatttgaaacactctatttgtgcaatttgcaagtgtagatttcaagcgttttaaggtcaatggcagaaaaggaaatatcttcgtttcaaaactagacagaatcattcccacaaactgcgttgtgatgtgttcgttcaactcacagagtttaacctttctgttcatagagcagttaggaaacactctgtttgtaaagtctgcaagtggacattcagacctccttgaggccttcgttggaaacgggatttcttcatattctgctagacagaagaattctcagaatcttccttgtgttgtgtgtattcaactcacagagttgaacgatcctttacacagagcagacttgaaacactctttttgtggaatttgcaagtggagatttcagccgctttgaggtccatggtagaaaaggaaatatctttgtataaaaactagtcagaatgattctcagaaacttctttgtgatgtgtgcgttcaactcacagagtttaacctttcttttcatagagcagttaggaaacactctgtttgtaaactctgcaagtggatattcagacctctttgaggccttcgttggaaactggatttcttcatactatgctagacagaagaattctcagtaacttccttgtgttgtgtgtattcaactcacagagttgaacgatcctttacacagagcagacttgaaacactctttttgtggaatttgcaagtggagatttcagccgctttgaggtcaatggtagaataggaaatatcttcctatacaaactagacagaatgattctcagaaactcctttgtgatgtgtgccttcaactcacagagtttaacctttcttttcatagagcagttaggaaacactctgtttgtaaagtctgcaagtggatattccgacatccttgaggctttcgttggaaacgggatttcttcatattctgcaagaaagaagaattctcagtaacttccttgtgttgtgtgtattcaactgacagagttgaactttcatttagagagagcagatttgaaacactgtttttgtggaatttgcaaatggagatttcaagcgctttggggccaaaggcagaaaacgaaatatcttcgtataaaaactagacagaatcattctcagaaactgctctgcgatgtgtgcgttcaactctcagagtttaacttttcttttcattcagcggtttggaaacactctgtttgtaaagtctgcacgtggataatttggccacttagaggccttcgttggaaacgtgtttttttcatgtaaggctagacagaagaattctcagtaacttccttgtgttgtgtggattcaactcacagagttgaacgatcctttacacagagcggacttgaaacactcgttttgtggaatttgcaagtggagatttcagccgctttgaggtcaatggtagaaaaggaaatatcttcgtacaaaaactagacagaacgattctcagaaactcctttgtgatgtgtgcgttcaactcacagagtttaacctttcttttcatagagcagttaggaaacactctgtttgtaacgtctgcaagtggatattcagacctccttgaggccttcgttggaaacgggatttcttcctattctgctagacagaagaattcccagtaacttccttgtgttgtgtgtgttcaactcacagagttgaactttcctttacacagagcagatttgaaacactctttttgtggaatttgcaggtggagatttcaagcgctttgaggccaaaggcagaaaaggaaatatcttcgtataaaaactagacagaatcattctcagaaactgctctgcgatgtgtgcattcaactctcagagtttaatttttcttttcattcagcagtttggaaacattctctttgtaaagtctgcacgtggatattttgaccacttagaggccttcgttggaaacgggttttattcctgtaaggctagacagaagaattcccagtaacttccttgtgttgtgtacattcaacacacagatttgaacgttcccttagacagagctgatttgaaacactctttttgtgcaattggcaagtggagatttcaagcgctttaaggtcaatggcagaaaaggaaatatcttcgtttcaaaactagacagaatcattcccacaaactgcgttgtgatgtgttcgttcaactcacagagtttaacctttctgttcatagagcagttaggaaacactctgtttgtaaagtctgaaagtggatattctgacatcttgtggccttcgttggaaacaggatttcttcatattctgctagacagaagaattctcagaatcttcccttgtgttgtgtgtattccactcacagagttgaacgatggtttacacagagcagatttgaaacactctttgtgtggaatttgcaagtggagatttcagccgctttgaggtcaatggtagaaaaggaaatatcttcgtataaaaactagacagaatgattctcagaaactcctatgtgatgtgtgcgttcaactcacagagtttaacttttcttttcagagagcagttaggaaacactctgtttgtaaagtctgcaagtggatattcagacctctttgaggccttcgttggaaacgggatttcttcatattatgctagacagaagaattctcagtaacttcctcgtgttgtgtgtattcaactcacagagttgaacgatcctttacacagagcagattagaaacactctttttgtggaatttgcaagtggagatttcagccgctttgaggtcaatggtagaaaaggaaatatcttcatagaaaaactagacagaatgattctcagaaacttcattgtgatgtgtgcgttcaactcacagagtttaacctttcttttcatagagcagttaggaaacactctgtttgtaaactctgcaagtgtatattcagacctctttgaggacttcgttggaaacgggatttcttcatactgtgctagacagaagaattctcagtaacttccttctgttgtgtgtattcaactgacagagttgaactttcatttagagagggcagatttgaaacactgtttttgtggaatttgcaagtggagatttcaagcgctttggggccaaaggcagaaaaggaaatatcttcgtataaaaactagacagaatcattctcagaatctgctctgtgatgtgtgcgttcaactctcagagtttaacttttcttttcattctacagtttggaaacactctgtttgtaaagtctgcacgtggatattttgaccacttagaggccttcgttggaaacgggtttttttcatgtaaggctagacagaagaattcccagtaacttccttgtgttgtgtgcattcaactcacagagttgaacgttcccttagacagagcagatttgaaacactctatttgtgcaatttgcaagtgtagttttcaagctctttaaggtcaacggcagaaaaggaaatatctgcgtttcaaaactagacagaatcattcccacaaactgcgttgtgatgtgttcgttcatctcacagagtttaacctttcttttcatagagcagttaggaaacagtctgtttgtaaattctgtaagtggataatttgacatcttgtggccttcgttggaaacgggatttcttcatattctgctagacagaagaattctcagtaacttccttgtgttgtgtgtattcaactcacagagttgaacgatcctttacacagagcagacttgaaacactgttttagtggaatttgcaagtggagatttcagccgctttgaggtcaatggtagaataggaaatatcttcctatagaaactagaccgaatgattctcagaaactgctttgtgatttgtgcgttcaactcacagagtttaacctttcttttcatagagaagttaggaaacactctgtttgtaaagtctgcatgtggatattcagacctccttgaggccttcgttggaaacgtgatttcttcatattatgctagacagaagaattctcagtaacttccttgtgttgtgtgtattcacctcaccgatttgaacgatcctttacacagagcagacttgaaacactctttttgtggaatttgcaagtggagatttcagccgctttgaggtcaatggtagaataggaaatatcttcctatagaaattagacagaatgtttctcagaaactcctttctgatgtgtgtgttcaactcacagagtttaacctttcttttcatagagcagttaggaaacactctgtttgtaaagtctgcaagtggatattcagacctctttgaggccttcgttggaaacgggtttttttcatgtaaggctagacagaagaattcccagtaacttccttgtgttgtgtgtgttcaactcacggagttgagctttcatttacacagagcagatttgaaacactctttttgtggaatttgcaagtggagatttcaagcgctttgaggccaaaggcagaaaaggaaatatcttcgtataaaaactagacagaatcattctcagaaactgctgcgtgatgtgtgcgttcaactctcagagtttaacttttcttttcattcagcggtttggaaacactctgtttgtaaagtctgcacctggatattttgaccacttagaggccttcgttggaaacgggtttttttcatgtaaggctagacagaagaattcccagtaacttccttgtgttgtgtacattcaactcacagagttgaacagttcccttagacagagcagatttgaaacactctttttgtgcaattggcaagtggagatttcaagcgctttaaggtcaatggcagaaaaggaaatatcttcgtttcaaaactagagagaatcattcccacaaactgcgttgtgatgtgttcgttcaactcacagagtttaacttttctgttcatagagcagttaggatacactctgtttgtaaagtctgtaagtggatattctgacatcttgtggccttcgttttaaacgggatttcttcatattctgctagacagaagaattctcagaatcttccttgtgttgtgtgtattcaactcacagagttgaacgatggtttacacagagcagatttgaaacactctttttgtggaatttgcaagtggagatttcagccgcttagaggtcaatggtagaaaaggaaatatcttcgtataaaaactagacagaatgattctcagaaactcctttgtgatgtgtgcgttcaattcacagagtttaacctttctattcatagagcagttaggaaacactgtgtttgtaaagtctgcaagtggatattcagacctctttgaggctttcgttggaaacgggatttcttcatattctgctagacagaagaattctcagtaacttccttgtgctgtgtgtattcaactcacagagttgaacgatccttttcagagagcagactttaaacactctttttgtggaatttgcaagtggagatttcagccgctttgaggtcaatggtagaaaaggaaatatcttcgtataaagactagacagaatgattctcagaaactcctttgtgatgtgtgcgttcaactcacagagtttaacctttctgttcatagagcatttaggaaacactctgtttgtaaagtctgcaagtggatattcagacctccttgaggccttcgttggaaacgggatttcttcatattctgctagacagaagaattctcagtaacttccttgtgttgtgtgtattcaactgacagagttgaactttcatttagagagagcagatttataacactgtttttgtggaatttgcaagtggagatttcagccgctttggggccaaaggccgaaaaggaaatatcttcgtataaaaactagacagaaatcattctcagaaactgctctgcgatgtgggtgttcaactctcagagtttaacttttcttttcattcagcagtttggaaacactctgtttgtaaagtctgcacgtggatattttcaccacttagaggccttcgttggaaacgggtttttttcctgtaaggctagacagaagaattcccagtaacttccttgtgttgtgtacattcaactcacagagttgaacgttcccttagacagagcagatttgaaacactctttttgtgcaattggcaaatggagatttcaagcgctttaagttcaatggcagaaaaggaaatatcttcgtttcaaaactagacagaatcattcccacaaactgcgttgtgatgtgttcgttcaactcacagggtttaacctttcttttcatagagcagttaggaaacagtctgtttgtcatttctgtaagtggatattctgacatcttgtggccttcgttggaaacgggatttcttcatattctgctagacagaagaattctcagcaacttccttgtgttgtgtgtattcaactcacagagttgaacgatcctttgagcagacttgaaacactctttttgtggaatttgcaagtggagatttaagccgctttgaggtcaattgtagaaaaggaagtatcttcgtataaaaactagacagaatgattctgagaaactcctttgtgatgtgtgcgttcaactcacagagtttaacctttcttttcatagagcagttaggaaacactctgtttgtgaagtctgcaagtggatattcagacatctttgaggctttcgttggaaactggatttcttcatattctgctatacagaagaattctcagaaacttccttgtgttgtgtgtattcaactcacagagttgaacgatcatttacacagagcagacttgagacactctttttgtggaatttgtaagtggacatttcagccgctttgaggtcaatggtagaaaaggaaatatcttcatataaaaactagacagaatgattctcagaaactcctttgtgatgtgtgcgttcaactcacagagtttaatctttcttttcatagagcagttaggaaacactctgtttgtaaagactgcaagtggatattcagacctctttgaggccttcgttggaaacgggtttttttcatataaggctagacagagaagattctcagtaacttccttgtgttgtgtgtattcaactcacagagttgaactttcatttacacagagcagatttgaaacactctttttgtggaatttgcaaatggagatttcaagcgctttgaggccaaaggcagaaaaggaaatatcttcgtataaaaactagacagatcattgctcagaaactgctctgggatgtgtgcgttcaactctcagagtttaacttttcttttcattcagcagtgtggaaacactctgtttgtaaagtctgcacgtggatattttgaccacttagaggccttcgttggaaacgggtttttttcctgtaaggctagacagaagaattcccagtaacttccttgtgttgtgtacattcaactcacagagttgaacgttcccttagacagagcagatttgaaatactctttttgtgcaattggcaagtggagatttcaagcgctttaaggtcaatggcagaaaaggaaatatcttggtttcaaaactagacagaatgaatcccacaaactgcgttgtgatgtgttcgttcaactcacagagtttaacctttctgttcatagagcagttaggaaacactctgtttgtaaagtctgtaagtggatattctgacattttgtggccttggttggaaatgggatttcttcatatactccaagacagaagaattctcagtaacttccttgtgttgtgtgtattcaactcacagagttgaacgatcctttacacagagcggacttgaaacacactttttgtggaatttgcaagtggagatttcagccgcattgaggtcaatggtagaaaaggaaatatcttcgtataaaagttagacagaatgattctcagaaactcctttgtgatgtgtgcgttcaactcatagagtttaacttttcttttcatagagcagttaggaaacactctgtttgtaaagacttcaagtggatattcagacctctttgaggccttcgttggaaacgggatttcttcatattctgctagacagaagaattcccagtaacttccttgtgttgtgtgtgttcaactcacagagttgaacttccgtttacacagagcagatttgaaacactctttttgtggaatttgcaaatggagatttcaagcgctttgaggccaaaggcagaaaaggaaatatcttcgtataaaaattcgacagaatcattctcagaaactgctctgcgatgtgtgcgttcaactctcagagtttaacttttcttttcattcagcagtttggaaacactctgtttgtaaagtctgcacgtggatattttgaccacttagaggccttcattggaaacgggtttctttcctgtaaggctagacagaagaattcccagtaacttccttgtgttgggtgcattaaactcacagagttgaacgttcccttagacagagcagatttgaaacactctatttgtgcaatttgcaagtgtagatttcaagcgctttaaggtcaatggcagaaaaggaaatatcttcgtttcaaaactagacagaatcattcccacaaactgcgttgtgatgtgttcgttcaactcacagagtttaacctttgttttcatagagcagttaggaaacagtctgtttgtaaattctgtaagtggatattctgacatcttgtggccttcgttggaaacgggatttcttcatattctgctagacagaagaattctcagtaacttccttgtgttgtgtgtattcaagtcacagagttgaacgatcctttacacagagcagacttgtaacactctttttgtggaatttgcaagtggagatttcagccgctttgaagtcaaaggtagaaaaggaaatatcttcctataaaaactagacagaatgattctcagaaactcctttgtgatgtgtgtgttcaactcacagagtttaacctttcttttcatagaacagttaggaatcactctgtttgtaaagtctgcaagtggatattcagacctctttgaggccttcgttggaaacgggtttttttcatataaggctagacagaagaattcccagtaacttccttgtgttgtgtgtgttcaactcacagagctgaactttcatttacacagagcagatttgaaacactctttttgtggaatttgcaagtggagatttcaagcgctttgaggccaaaggcagaaaaggaaatatcttcgtttcaaaactagacagaatgattctcagaaactcctttgtgatgtgtgcgttcaactcacagagttcaacctttcttttcatagagcagttgggaaacactctgtttgtaaagtctgcaagtgcttattcagacttctttgaggccttcgttggaagcgggatttcttcatattctgctagacagaagaattctcagtaactgccttgtgttgtgtgtattcaactcacagagttgaaggatcctttacacagagcagacttgaaacactctttttgtggaatttgcaagtggagatttcagccgctttgaggtcaatggtagaataggaaatatcttcctatagaaactagacagaatgattctcagtaaactcctttgtgatgtgtgcgttcaactcacagagtttaacctttcttttcatagagcagttaggaaacactctgcttgtaaagtctgcaagtggatattcagccctctttgaggccttcgttggaaacgggtttttttcatataaggctagacagaagaattcccagtaacttccttgtgttgtgtgtgttcaactcacagagttgaactttcatttacacagagcagatttgaaacactctttttgtggaatttgcaaatggagatttcaagcgctttgaggccaaaggcagaaaaggaaatatcttcgtacaaaaactagacagaatcattctcagaaactgctctgcgatgtgtgcgttcaactctcagagtttaacttttcttttcattcagcagtttggaaacactctgtttgtaaagtctgcacgtggataatttgaccacttagaggccttcgttggaaacgggtttttttcatgtaaggctacacagaagaattcccagtaacttccttgtgttgtgtacattcaactcacagagttgaacgtttccttagacagagcagatttgaaacactctttttgtgcaattggcaagtggagatttcaagcgctttgaggtcaatggcagaaaaggaaatatcttcgtttcaaaactagacagaatcattcccacaaactgcgttgtgatgtgttcgttcatctcacagagtttaacctttcttttcgtagagcagttaggaaacagtctgtttctaaattctgtaagtggatattctgacatcttgtggccttcgttggaaacgggatttcttcatattctgctagacagaagaattctcagaatctttccttgtgttgtgtgtattcaactcacagagttgaacgatcctttacacagagcagacttgaaacactctttttgtggaatttgcaagtggagatttcagccgctttgaggtccatggtagaaaaggaaatatcttcgtataaaaactagacagatgattctcagaaactcttttgtgatgtgtgcgttcaactcacagagtttaacctttctgttcatagagccgttaggaaacactctgtttgtaaagtctgcaagtggatattcacacctccttgtgaccttcgtttgaaacgggatttcttcatattctgctagacagaggaattctcagtaacttccttgtgttctgtgtattcaactgacagagttgaacgatcctttacacagagcagacttgaaacactctttttgtggaatttgcaagtggagatttcagcctctttgaggtcaatggtagaaaaggaaactatcttcgtatacagactagacagaatgattctcagaaactcctttgtgatgtgtgttttcaactcacagagtttaacctttcttttcatagagcagttaggaaacactctgtttataaagtctgcaagtggatattcagacccctttgaggccttcgttggaaacgggatttcttcatattatgctagacagaagaattcccagtaacttccttgtgttgtgtgtgttcaactcacagagttgaactctcatttacacagagcagatttgaaacactctttttgtggaatttgcaaatggagatttcaagcgctttgaggccaaaggcagaaaaggaaatatcttcgtttcaaaactagacagaatcattctcagaaactgctgcgtgatgtgtgcgttcaactctcagagtttaacttttcttttcattcagcggtttggaaacactctgtttgtaaagtctgcacgtggaaattttgaccacttagaggccttcgttggaaatgggtttttttcatgtaaggctagacagaagaattcccagtaacttccttgtgttgtgtgcattcaactcacagagttgaacgttcccttagacagagcagatttgaaacactctatttgtgcaatttgcaagtgtagttttcaagctctttaaggtcaacggcagaaaaggaaatatcttggtttcaaaactagacagaatcattcccacaaactgcgttgtgatgtgttcgttcaactcacagagtttaacctttctgttcatagagcagttaggaaacactctgttaagtctgtaagtggatattctgacatcttgtggccttcgttggaaacgggatttcttcatattctgctagacagaagaattctcagtaacttccttgtgttgtgtgtattcaactcacagagctgaacgatcctttacacagagcagacttgaaacattctttttgtcgaatttgcaagtggagatttcagccgctttgaggtcaatggtagaataggaaatatcttcctatagaaactagacagaatgattctcagaaaatcctttgtgacgtgtgcgttcaactcacagagtttaacttttcttttcatagagcagttaggaaacactctgtttgtaaagtctgcaagtggatattcagacctctttgaggccttcgttggaaacgggatttcttcatattctgctagacagaagaattctcagtaacttccttgtgttgtgtgtattcaactcacagagttgaacgatcctttacacagagcagacttgaaacactctttttgtggaatttgcaagtggagatttctgcctctttgaggtcaatggtagaataggagatatcttcctatagaaactagacagaatgattctcagaaactcctttttgatgtgtgcgttcaactcacagagtttaacttttcttttcatagagcagttagtaaacactctgtttataaagtctgcaagtggatattcagacccctttgaggccttcgttggaaacgggatttcttcatattgtgctagacagaagaattcccagtaacttgcttgtgttgtgtgtgttcaactcacagagttgaactttgatttacacagagcagatttgaaacactctttttgtggaatttgcaagtggagatttcaagcgctttgaggccaaaggcagaaaaggaaatatcttcgtataaaaactagacagaatcattctcagaaactgctctgcgatgtgtgcgttcaactctcagagtttaaattttcttttcattcagcagtttggaaacactctgtttgtaaagtctgcacgtggataatttgaccacttagaggccttcgttggaaacgggttttttcctgtaaggctagacagaagaattcccagtaacttccttgtgttgtgtacattcaactcacagagttgaacgttcccttagacagagcagatttgaaaaactctttttgtgcaattggcaagtggtgatttcagccgctttgaggtcaatggtagaaaaggaaatattttcgtataaaaactagacagaatcattcccacaaactgcgttgtgatgtgttcgttcaacccacagagtttaacctttctgttcatagagcagttaggaaacactctgtttgtaaagtatgaaagtggatattctgacatcttgtagccttcgttggaaacgggatttcttcgtattctgctagacagaagaattctcagtaacttccttgtgttgtgtgtattcaactcatagagttgaacgatcctttacacagagcagacttgaaacactctttttgtggaatttgcaagtggagatttcagccgctttgaggtcaatggtagaaaaggaaatatcttcgtataaagactagacagaatgattctcagaaaatcttttgtgatgtgtgcgttcaactcacagagtttaacttttcttctcatagagcagttaagaaacactctgtttgtaaagtctgcaagtggatattcagacctctttgaggccttcgttggaaacgggatttcttcaaattatgctagacagaagaattctcagtaacttccttgtgttgtgtgtattcaactcacagaattgaacgatcctttacacagagcagacttgaaacactctttttgtggaatttgcaagtggagatttcagctgctttgaggtcaatggtagaaaaggaaatatcttcgtatagaaacaagacagaatgattctcagaaactcctttgtgatgtgtgcgttcaactcacagagtttaacctttcttttcatagagcagttaggaaacactctgtttgtaaagtctgcaattggatattcagacctctttgaggccttcgttggaaacgggtttttttcatataaggctagacagaagaattctctgtaacttccttgtgttgtgtgtattcaactcacagagttgaacgatcctttacacagagcagacttgaaacactctttttgtggaatttgcaagtggagatttcagccgctttgaggtcaatggtagaataggaaatatcttcctatagaaactagacagaatgattctcagaaactcctttgtgatgtgtgcgttcaactcacagagtttaacctttcttttcatagagcagttaggaaacactctgtttgtaaattctgcaagtggatattcagacctctttgaggccttcgttggaaacgggtttttttcatataaggctagacagaagaattctcagaatcttcccttgtgttgtgtgtattcaactcaccgagttgaacgatcctttacacagagcagacttgaaacactctttttgtggaatttgcaagtggacatttcagccactttgaggtccgtggtagaaaaggaaataccttcgtataaaaactagacagaatgattctcagaaaatcttttgtgatgtgtgcgttcaactcaccgagtttaacttttcttctcatagagcagttaggaaacactctgtttgtaaagtctgcaagtggatattccgacctctttgaggccttcgttggaaacgggatttcttcatattatgctagacagaagaattcccagtaacttccttgggttgtgtgtattcaactcacagagttgaacgatcctttacacagagcagacttgtaacactctttttgtggaatttgcaagtggagatttcagccgctttgaagtcaaaggtagaaaaggaaatatcttcctataaaaactagacagaatgattctcagaaactccattgtgatgtgtgtgtccaactcacagagtttaacctttcttttcatagagcagttaggaaacactcagtttgtaaagtctgcaagaggatattcagacctctttgaggccttcgttggaaacgggtttttttcatataaggctagacagaataattctcagtaacttccttgtgttgtgtgtattcaactctcagagttgaacgatcctttacagagagcagacttgaaacactctttttgtggaatttgcaagtggagatttcagccgctttgaggtcaatggtagaataggaaatatcttcctatcgaaactagacagaatgattctcagaaactcctttgtgatgtgtgcgttcaactcacagagttcaacttttctttccatagagcagttaggaaacactctgtttgtaaagtctgcaagtggatattcagacctctttgaggccttcgttggaaacgggatttcttcatattctgcaagacagaagaattctcagtaacttccttgtgttgtgtgtattcaactcacagagttgaatgatcctttacagagagcagactttaaacacactttttgtggaatttgcaagtggagacttcagccgctttgaggtcaatggtagaaaaggaaatatcttcgtataaagactagacagaatgattctcagaaacttctttgtgatgtgtgcgttcaactcacagagtttaacctttcttttcatagagcagttaggaaagactctgtttgtaaagtctgcaagtggatattcagacctctttgaggccttctttggaaacgggtttttttcatataaggctagacataagaattctcagtaacttccttgtgttgtgtgtattcagctgacagagttgaactttcatttagagagagcagatttgaaacactgtttttgtggaatttgcaagtggagatttcaagcgctttgtggccaaaggcagaaaacgatatatcttcgtataaaaactagacagaatcattctcagaaactgctctgcgatgtgtgcgttcaactctcagagtttaacttttcttttcattcagcagtttggaaacactctgtttgtaaagtctgcacgtggataacttgaccacttagaggccttcgttggaaacgggtttttttctgtaaggctagacagaagaattcccagtaacttccttgtgttgtgtgcattcaactcacagagttgaacgttcccttagacagagcagatttgaaaaactctatttgtgcaatttgcaagtgtagatttcaagcgatttaaggtcaacggcagaaaaggaaatatcttcgtttcaaaactagacagaatcattcccacaaactgcgttgtgatgtgttcgttcaactcacagagtttaacccttctgttcatagagcagttaggaaacactctgtttgtaaagtatgcaagtggatattcagacctccttgaggccttcgttggaaacgggatttcttcatattctgctagaccgaagaattctcagtaacttccttgtgttgtgtgtattcaactcacagagttgaacgatcctttacacagagcagacttgaaacactctttttgtggaatttgccagtggagatttcagccgctttgagttcaatggtagaataggaaatatcttcctatagaaactagagagaatgattctcagaaaatcttttgtgatgtgtgcgttcaactcacagagtttaacttttcttctcatagagcagttaggaaacactctgtttgtaaagtctgcaagtggatattcagacctgtttgaggccttcgttggaaacgggatttcttcatattatgctagacagaagaattctcagtaacttccttgtgttgtgtgtattcaactgacagagttgaactttcatttagagagagcagatttgaaacactgtttttgtggaatttgcaagtggagatttcaagcgctttggggccaaaggcagaaaaggaaatatcttcgtataaaaacaagacagaatcattctcagaaactgctctgcgatgtgtgcgttcaactctcagtagtttaacttttcttttcattcagcagtttggaaacactctgtttgtaaagtctgcacgtggatattttgaccacttagaggccttctttggaaacgggtttttttcctgtaaggctagacagaagaattcccagtaacttccttgtgttgtgtgcattcaactcacagagttgaacgttcccttagacagagcagatttgaaacactctatttgtgcaattggcaagtgtagatttcaagcgctttaaggtcaatggcagaagaggaaatatcttcgtttcaaaactagacagaatcattcccacaaactgcgttgtgatgtgttcgttcaactcacagagtttaacctttctgttcatagagcagttaggaaacactctgtttgtaaagtctgtaagtggatattctgaaatcttgtggtcttcgttggaaacgggatttcttcatattctgctagacagaagaattctcagaaacttccttgtgttgtgtgtattcaactcacagagttgaacgatcgtttacacagagcagacttgagacactctttttgtggaatttgtaagtggagatttcagccgctttgaggtcaatggtagaaaaggaaatatcttcatatataaaccagacagaatgattctcataaactcctttgtgatgtgtgcgttcaactcacagagtttaacttttcatttcatagagccgttaggaaacactctgtttgtaaaatctgcaagtggatattcagacctctttgaggccttcattggaaacgggatttcttcatattatgctagacagaagaattctcagtaacttccttgtgttgtgtgtattcaactcacagagttgaacgatcctttacacagagcagacttgaaacactctttttgtggaatttgcaagtggagatttcagccgctttgaggtcaatggtagaaaaggaaactatcttcgtataaagaccagacagaatgattctcagaaactactttgtgatgtgtgcgttcaactcacagggtttaacctttcttttcatagagcggttaggaaacactctgtttgtaaagtctgcaagtggatattcagacctccttgagggcttcgttggaaacgggatttcttcatattctgctagacagaagaattctcagtaacttccttgtgttgtgtgtattcaacttacagagttgaacgatcctttacacagaacagacttgaaacactgtttttgtggaatttgcaagtggagatttcagccgctttgtggtcaatggtagaataggaaatatgttcctatagaaactagacagaatgattctcagaaactcctttgtgatgtgtgcgttcaactcacagagtttaacctttcttttcatagagcagttaggaaacactctgtatgtaaagtctgcaagtggctattcagacctctttgaggccttctttggaaacgggatttcttcatattatgttagagagaggaattctcaggaacttccttgtgttgtgtgtattcaactcacagagttgaacgatcctttacacagagcagacttgaaacactctttttgtggaatttgcaagtggagatttcagccgctttgaggtcaataggtagaataggaaatatcttcctatagaaactagacagaatgattctcagaaactcctttgtgatgtgtgcgttcaactcgcagagtttaacctttcttttcatagagcagttaggaaacactctgttggtaaagtctgcaagtggatattcagacctcgttgaggccttcgttggaaacgggatttcttcatattatgctagacagaagaattctcagtaacttccttgtgttgtgtgtattcaactcacagagttgaacgatcctttacacagagcagacttgaaacactctttttgtggaacttgcaagtggagatttcagccgctttgaggtcaattgtagaataggaaatatcttcctatagaaactagacagaatgattctcagaaacttctttgtgatgtgtgcgttcaactcacagagtttaacctttcttttcatagagcagttaggaaacactctgtttgtaaactctgcaagtggatattcagacctctttgaggccttcgttgcaaacgggatttcttcatattatgcctgacagaagaattctcagtaacttccttgtgttgtgtgtattcaacgcacagagttgaacgatcctttacacagagcatacttgaaacactcttcttgcggaatttgcaagtggagatttcagccgctttgaggtcaatggtagaataggaaatatcttcctatagaaactagacagaatgattctcagaaactcctttgtgatgtgtgcgttgaactcacagagtttaacctttcttttcatagagcagttaggaaacactctgtttgtaaagtctgcacgtggatatttggacttctttgaggccttcgttggaaacgggtttttttcatgtaaggctaggcagcagaattctcagtaacttccttgtgttgtgtgtattcaactgacagagttgaactttcatttagagagagcagatttgtaacactgtttttgtggaatttgcaagtggagatttcaagcgatttgcggccaaaggcagaaaaggaaatatcttcgtataaaaactagacagaatcattctcagaaactgctctgcgatgtgtgcgttcagctctcagagtttaacttttcttttcattcagcagtttggaaacactctgtttgtaaagtctgcacgtggatattttgaccacttagaggccttcgttggaaacgggtttttgtcatgtaaggctagacagaacaattcccagtaacttccttgtgttgtgtacattcaactcacagagttgaacgttcccttagtcagagcagatttgaaacactctttttgtgcaattggcaagtggagatttcaagcgcttaaggtcaatggcagaaaaggaaatatcttcgtttcaaaactagacagaatcattcccacaaactgcgttgtgatgtgttcgttcaactcacagagtttaacatttctgttcatagagcagttaggaaacactctgtttgtaaagtctgtaagtggatattctgacatcttgtggccttcgttggaaacgggatttcttcctattctgctagacagaagaattctcagcaacttccttgtgttgtgtgtattcaactcacagagttgaactctggtttacacagagcagatttgaaacactctttttgtggaatttgcaagtggagatttcagccgctttgaggtcaatggtagaaaaggaaatatcttcgtataaaaactagacagaatgattctcagaaactcctttgtgatgtgtgcgttcaactcacagagtttaaccattcttttcatagagcagttaggaaacactctgcttgtaaattctgcaagtggatattcagacctccttgaggccttcgttggaaacgggatttcttcatattctgctagacagaagaattctcactaacttccttgtgttgtgtgtattcaactgacagagttgaactttcatttagagagagcagatttgaaacactgtttttgtggaatttgcaagtggagatttcaagcgctttggggccaaaggcagaaaaggaaatatcttcgtataaaaactagacagaatcattctcagaaactgctctgcgatgtgtgcgttcaactctcagagtttaacttttcttttcattcagcagtttggaaacactctgtttgtaaagtctgcaagtggataatttgaccacttagaggccttcgttggaaacgggtttttttcatgtaaggctagacagaagaattctcagtaacttccttgtgttgtgtgtattcaattcacagagttgaacgatcctttacacagagcagacttgtaacactctttttgtggaatttgcaagtggagatttcagccgctttgaagtcaaaggtagaaaaggaaatatcttcctataaaaactagacagaatcattcccacaaactgcgttgtgatgtgttcgttcaactcacagcagtttaacctttctgttcatagagcagttaggaaacactctgtgtgtaaagtctgcaagtggatattcagacctctttgaggccttcgttggaaacgggatttcttcatattctgctagacagaagaattctcagtaacttcctcgtgttgtgtgtactcaactcacagagttgaacgatcctttacacagagcagacttgaaacactctttttgtgaaatttgcaagtggagatttcagccgctttgtggtcaatggtagaataggaaatatcttcctatagaaactagacagaatgattctcagaaacttctttgtgatgtgtgcgttcaactcacagagtttaaccttccttttcatagagcagttgggaaacactctgtttttaaagtctgcaagtggatattcagacctctttgaggccttcgttggaaacgggtttttttcatgtaaggctagacagaagaattctcagaaacgtcctggtgttgtgtgttttaaactcacagagttcaacgatcctttacacagagtagacttgaaacactctttttgttgaattggcaagtggagatttcagccgctttgaggtcagtggtagaaaaggaaatatcttcgtataaaaactagacagagtgattctcagaaactcctttgtgatgtctgcgttcaactcacagggtttaacctttcttttcatagagcagttaggaaacactctgtttgtaaagtctgcaagtggatattcagacctccttgaggccttcgttggaaaccggatttcttcatattttgctatacagaatatttctcagaaacttccttgtgttgtgtgtattcaactcacagagttgaacgatcctttacagagagcagacttgaaacactctttttgtggaatttgcaagtggagatttcagccgctttgaggtcaatggtagaataggaaatatcttcctatagaaactagacagaatgattctcataaactcctttgtgatgtgtgcgttcaactcacagagtttaacctttctgttcatagagcagttaggaaacactctgtttgtaaagtctgcaagtggatattcagacctctttgaggccttcgttggaaacgggatttcttcatattatgctagacagaagaattctcagtaacttccttgtgttgtgtgtattcaactcacagagttgaaggatcctttacagagagcaggcttgaaacactctttttgtcgaatttgcaagtggagatttcagccgctttcaggtcaatggtagaataggaagtatcttcttatagaaactagacagaatgattctcagaatctcctttgaaatgtgtgcgttcaactcacagagtttaacctttcttttcatagagcagttaggaaacactctgtttgtaaagtctgcaagtggatattcagacctctttgaggccttcgttggaaacgggatatcttcatattatgctagacagaagaattcccactaacttccttgtgttgtgtgtgttcaactcacagagttgaactttcatttacccagagcagatttgaaacactctttttgtggaatttgcaagtggagatttcaagcgctttgaggccaaaggcagaaaaggaaatatcttcgtttcaaaactagacagaatcattctctgaaactgctctgcgatgtgtgcgttcaactctcagagtttaacttttcttttcattcagcagtttggaaacactctgtttgtaaagtctgcacgtggatattttgaccacttagaggccttcgttggaaacgggtttttttcctgtaaggctagacagaagaattcccaggaacttccttgtgttgtgtacattcaactcacagagttgaacgttcccttagatagagcagatttgaaacactctttttgtgcaattggcaagtggtgatttcagccgctttgaggtcaatggtagaaaaggaaatatcttcgtataaaaactagacagaacgattctcagaaactcctttgtgatgtgtgcgttcaactcacagagtttaacctttcttttcatagagcagttaggaaacactctgtttgtaaagtctgcaagtggatattcagacccctttgaggccttcgttggaaacgggatttcttcatattatgctagacagaagaattctcagtaacttccttgtgttgtgtgtattcaactcacagagttgaaggatcctttacacagagcagacttgtaacactctttttgtgtaatttgcaagtggagatttcagccgctttgaggtcaatggtagaaaaggaaatctcttcgtataaaaactagacagaatgattctcagaaactcctttgtgatgtgtgccttcaactcacagagtttaacctttcttttcatagagcagttaggaaacactctgtttgtaaagtctgcaagtggatattcagacctctttgaggccttcgttggaaacgggatttcttcatactgtgctagacagaagaattcccagtaacttccttgtgttgtgtgtgttcaactcacagagttgaactttcatttacacagagcagattggaaacactctttttgtggaatttgcaagtggagatttcaagcgctttgaggccaaaggcagaaatggaaatatcttcgtataaaaactagacagaatcattctcagaaactgctctgcgatgtgtgcgttcaactctcagagtttaacttttcttttcattcagcagtttggaaacactctgtttgtaaagtctgcacatggatattttgaccacttagaggccttcgttggaaacgggtttctttcctgtaaggctagacagaagaattcccagtaacttccttgtgttgtgtacattcaactcacagagttgaacgttcccttagacacagcagatttgaaacactctttttgtgcaattggcaagtggagatttcaagcgctttaaggtcaatggcagtaaaagaaatatcttcgtttcaaaactagacagaatcattcccacaaactgcgttgtgatgtgttcgttcaactcacagagtttaacctttctgttcatagagcagttaggaaacactctgtttgtaaagtctgcaagtggatattctgacatcttgtggccttcgttggaaatgggatttcttcatattctgctagacagaagaattctcagtaacttccttgtgttgtgtgtattcaactcacagaattgaacgatcctttacacagagcagacttgaaacactctttttgtggaatttgcaattgtagatttcagccgctttgaggtcaatggtagaaaaggaaatatcttcgtatagaaacaagacagaatgattctcagaaactcctttgtgatgtgtgtgttcaactcacagagtttaacctttcttttcatagagcagttagtaaacactctgtttataaagtctgcaagtggatattcagacccctttgagtccttcgttggaaacgggatttcttcatattatgctagacagaagaattcccagtaacttccttgtgttgtgtgtgttcaactcacagagttgaactttcatttacacagagcagatttgaaacactctttttgtggaatttgcaagtggagatttcatgcgctttgaggccaaaggcagaaaaggaaatatcttcgtttcaaaactagacagaatcattctcagaaactgctgcgtgatgtgtgcgttcaactctcagagtttaacttttcttttcattcagcggtttggaaacactctgtttgtaaagtctgcacgtggaaattttgaccacttagcggccttcgttggaaacgggattttttcatgtaaggctagacagaagaattctcagtaacttccttgtgttgtgtgtattcaactcacagagttgaacgatcctttacacagagcagacttgaaacactctttttgtggaatttgcaagtggggatttcagccgctttgaggtcaatggtagaaaaggaaatatcttcgtataaagactagacagaatgattcgcagaaactcctttgtgatgtgtgcgttcaactcacagagtttaacctttcttttcatagagcagttaggaaacactctgtttgtaaagtctgcaagtggatattcagacctccttgaggccttctttggaaacgggatttcttcatattctgctagacagaagaattctcagcaacttccttgtgttgtgtgtattcaactcacagagttgaacgatcctttacacagagcagacttgaaacactctttttgtggaatttgcaagtggagatttcagccgctttgtggtcaatggtagaaaaggaaactatcttcgtataaagactagacagaatgattctcagaaactcctttgtgatgtgtgcgttcaaatcacagagtttaacttttcttttcatagagcagttaggaaaccctctgtttgtaaagtctgcaagtggatattcagacctctttgaggccttcgttggaaacgggatttcttcatattatgctagacagaagaattctcagtaacttccttgtgttgtgtatattcaactcacagagttgaatgatcctttacacagagcagacttgaaactctctttttgtggaatttgcaagtggagatttcagccgctttgaggtcaatggtagaaaagcaaatatcttcgtataaagactagacagaatgattctcagaaactcctttgtgatgtgtgcgttcaactcacagagtttaacctttcttttcatagagcagttaggaaacactctgtttctaaagtctgcaagtggatattcagacctccttgaggcattcgttggaaacgggatttcttcatattatgctagacagaagaattctcagaaacttccttgtgttgtgtgtattcaactcacagagttgaacgatcgtttacacagagcagacttgagacacactttttgtggaatttgtaagtggagatttcagccgctttgaggtcaatggtagaaaaggaaatatcttcatataaaaactagacagaatgattctcataactcctttgtgatgtgtgcgttcaactcacagagttcaacctctcttttcatagagcagttgggaaacactctgtttgtaaagtctgcaagtggatattcagacttctttgaggccttcgttggaaacgggatttcttcatattatgctagacagaagaattctcagtaacttccttgtgttgtgtttattcaacacacagagttgaatgatcctttacacagagcagacttgaaacactctttttgtggaatttgcaagtggagatttcagccgctttgaggtcaatggtagaataggaaatatcttcttatagaaactagacaaaacgattctcagaaactcctttgtgatgtgtgcgttcaactcacagagtttgacctttcttttcatagagcagttaggaaacactctgtttgtaaagtctgcaagtggatattcagacctctttgaggccttcgttggaaacgggatttcttcatattctgctagacagaataattctcagtaacttccttgtgttgtgtgtattcaactcacagatatgaaggatcctttacagagagcaggcttgaaacactctttttgtcgaatttgcaagtggagatttcagccgctttgaggtcaatggtagaataggaaatatcttcttatagaaactagacagaatgattctcagaaacttctttgtgatgtgtgcgttcaactcacagagtttaacctttcttttcatagagcagttaggaaacactctgtttgtaaactctgcaagtggatattcggacctctttgaggccttcgttggaaacgggatttcttcatactgtgctagacagaagaattcccagtaacttccttgtgttgtgtgtgttcaactcacagagttgaacttccatttacacagagcagatttgaaacactctttttgtggaatttgcaagtggagatttcaagcgctttgaggccaaaggcagaaaaggaaatatcttcgtttcaaaactagacataatcattctcagaaactgctctgcgatgtgtgctttcaactctcagagtttaacttttcttttcattcagaagtttggaaacactctgtttgtaaagtctgcacgtggataatttgaccacttagaggtcttcgttggaaacgggtttttttcatgtaaggctagacagaagaattcccagtaacttcgttgtgttttatgcattcaactcacagagttgaacgttcccttagacagagcagatttgaaacactctctttgtgcaatttgcaagtgtagatttcaagcgctttaaggtcagtggcagaaaaggaaatatcttcgtttcaaaactagacagaatcattcccacaaactgcgttgtgatgtgttcgttcaactcacagagtttaacttttctgttcatagagcagttaggaaacactctgtttgtaaagtctgcaagtggatattcagacctccttgaggccttcgttggaaacgggatttcttcatattctgctagacagaagaattctcagtaacttccttgtgttgtgtgtattcaactcacagagttgaacgatcctttacacacagcagacttgaaacactctttttgtggaatttgcaagtggagatttcagccgctttgaggtcaatggtagaaaaggaaactatcttcatataaagactagacagaatgattctcagaaactcctttgtgatgtgtgtgtccaactcacagagtttaacctttcttttcatagagcagttaggaaacactctgtttgtaaagtctgcaagaggatattcagacctctttgaggccttcggtggaaacgggtttttttcatataaggctagacagaataattctcagtaacttccttgtgttgtgtgtatccaactcacagagttgaaggatcctttacagggagcaggcttgaaacactctttttgtcgaatttgcaagtggagatttcagccgctttgaggtcaatggtagaataggaaatatcttcttatagaaactagacagaatgattctcagaaactcctttgtgatgtgtgcgttcaactcacagagttcaacctttcttttcatagagcagttaggaaacactctgtttgtaaagtctgcaagtggatattcagacatctttgaggctttcgttggaaacgggatttcttcatattctgctagaaagaagaattctcagaatcttccttgtgttgtgtgtattcaactcacagagttgaacgatccttcacacagagcagacttgaaacactctttttgtggaatttgcaagtggagatttcagccactttgaggtccatggtagaaaaggaaatatcttcgtataaaaactagacagaataattatcagaaaatcctttgtgatgtgtgcgttcaactcacagagtttaacttttcttttcatagagcagttaggaaacactctgtttgtaaagtctgcaagtggatattcagacctccttgaggccttcgttggaaacgggatttcttcatattctgctagacagaagaattctcagtaacttccttgtgttgtgtgtattcaactcacagagttgaacgatcctttacacagagcagacttgaaacactctgtttgtgaaatttgcaagtggagatttcagccgctttgaggtcaatagtagaaaaggaaatatcttcgtagaaaaactagacagaatgattctcagaaactcctttgtgatgtgtgtgttcaactcacagagtttaacctttcttttcatagagcagttcgtaaacactctgtttgtaaagtctgcaagtggatattcagacccctttgaggccttctttggaaacgggatttcttcatattatgctagacagaagatttcccagtaacttccttgtgttgtgtgtgttcaactcacagagttgaactttcatttacagagagcagatatgaaacactctttttgtggaatttgcaaatggagatttcaagcgctttgaggccaaaggcagaaaaggaaatatcttcgtataaaaactagacagaatcattctcagaaaatcctctgtgatgtgtgcgttcaactctcagagtttaacatttcttttcattcagcagtttgaaaacactctgtttgtaaagtctgcacgtggatattttgaccacttagaggccttctttggaaacgggtttttttcatgtaagtgtagacagaagaattcccagtaacttccttgtgttgtgtgcattcaactcacagagttgaacgttcccttagacagagcagatttgaaacactctttttgtgcaatttgcaagtggagatttcaagcgctttagggtcaatggcagaaaaggaaatatcttcgtttcaaaactagacagaatgattctcaggaactcctttgtgatgtgtgcgttcaactcacagagtttaacctttcttttcatagagcagttaggaaacactctgtttgtaaagtctgcaagtggatattcagacctccttgaggccttcgttggaaacgggatttcttcatattctgctagacagaagaattctcagtaacttccttgtgttgtgtgtattcaactcacagagttgaacgatcctgtacacagagcagacttgaaacactctttttgtggaatttgcaagtggagatttcagccgctttgaggtcaatggtagaataggaaatatcttcctatagaaactagacagaatgattctcagaaactcctttgtgatgtgtgcgttcaactcacagagtttaacctttcttttcatagagcagttaggaaacactctgtttgtaaagtctgcaagtggatattcagacctccttgaggccttcgttggaaacgagatttcttcatattatgctagacagaagaattctcagtaacttccttgtgttgtgtgtattcaactcacagagttgaacgatcctttacacagagcagacttgaaacactcttcttgtggaatttgcaagtggagatttcagccgctttgaggtcaatggtagaataggaaatatcttcgtataaaaactagacagaatgattctcagaaactcctttgtgatgtgtgcgttcaactcacagagtttaacttttcttttcatagatcagttaggaaacactctgtttgtaaagtctgcaagtggatattcagacctctttgaggccttcgttggaaacgggatttcttcatattctgctagacagaagaattctcagaatcttccttgtgttgtgtgtattcaactcacagagttgaacgatcctttacacagagcagacttgaaacactctttttgtggaatttgcaagtggagatttcagctgctttgacgtccatggtagaaaaggaaatatcttcgtataaaaactagacagaatgattctgagaaactcctttgtgatgtgtgcattcaactcacaaagtttatcctttcttttcatagagcagttaggaaacactctgtttgtaaagtctgcaagtggatattcagacctccttgaggccttcgttggaaacgggatttcttcatattctgctagacagaagaattctcagtaacttccttgtgttgtgtgttttcaactcacagagttgaacgatcctttacacagagcagacttgaaacactctttttgtggaatttgcaagtggagatttcagccgctttgaggtcaatggtagaataggaaatatcttcctacagaaactagacagaatgattctcagaaactcctttgtgatgtgtgcgttcaactcacacagtttaacctttcttttcatagagcagttagtaaacactctgtttgtaaagtctgcaagtggatattcagacctccttgaggccttcgttggaaacgggatttcttcatattatgctagacagaagaattcccagtaacttccttgtgttgtgtgtgttcaactcacagagttgaactttcatttacacagagcagatttgaaacactctttttgtggaatttgcaaatggagatttcaagcgctttgaggccaaaggcagaaaatgaaatatcgtcgtataaaaactagacagaatcattctcagaaactgctctgcgatgtgtgcgttcaactctcagagtttaacttttcttttcattcagcagtttggaaacactctgtttgtaaagtctgcgcgtggataatttgaccacttagaggccttcgttggaaacgggtttttttcatgtaaggctagacagaagaattctcagtaacttccttgtgttgtgtgtattcaactctcagagttgaacgatcctttacagagagcagactttaaacactctttttgtggaatttgcaagtggagatttcagccgctttgaggtcaatggtagaaaaggaaatatcttcgtataaagactagacagaatgattcgcagaaactcatttgtgatgtgtgtgttcaactcacagagtttaacctttcttttcatagagcagttaggaaacactctgtttgtaaagtctgcaagtggatattcagacctctttgaggccttcgttggaaacgggtttttttcatataaggctagacagaagaattctcggtaacttccttgtgttgtgtgtattcaactgacagagttgaactttcatttagagagatcagatttgaaacactgtttttgtggaatttgcaagtggagatttcaaacgcttaggggccaaacgcagaaaaggaaatatattcgtataaaaactagacagaatgattctcagaaactcctttgtgatgtgtgcgttcaactcacagagtttaacctttctgttcatagagcagttaggaaacactctgtttgtaaagtctgcaagtggatattcagacctccttgaggccttcgttggaaacggggtttcttcatattctgctggagagaagaattctcagcaacttccttgtgttgtgtgtattcaactcacagagttgaacgatcctttacacagagcagacttgaaacactctttttgtggaatttgcaagtggagatttcaggcgctttgaggtcaatggtagaaaaggaaactatcttcgtataaagactagacagaatgattctcagaaaatcctttgtgatgtgtgcgttcaaatctcagagtttaacttttcttttcatagagcagttaggaaacactctgtttgtaaagtctgcaagtggatattcagacctctttgaggccttcgttggaaacgggatttcttcatattatgctagacagaagaattctcagtaacttccttgtattgtgtgtattcaactgacagagttgaactttcatttagagagagcagatttgtaacactctttttgtggaatttgcaagtggagatttcaagcgctttgcggtcaatggcagaaaacgaaatatcatcgtataaaaactagacagaatcattctcagaaactgctctgcgatgtgtgcgttcaactctcagagtttaacttttgttttcattcagcagtttggaaacactctgtttgtaaagtctgcacgtggatattttgaccacttagaggccttcgttggaaacgggtttttatcctgtaaggctagacagaagaattctcagtaacttccttgtgttgtgtgtattcaactcacagagttcaacgatgctttgcacagaggagacttgaaacacactttttgttgaatttgcaagtggagatttcagccgctttgaggtcaatggtagaataggaaatatcttcctatagaaactagacagaatgattctcagaaactcctttgtgatgtgtgcgctcaactcacagagtttaacctttcttttcatagagcagttaggaaacactctgtttgtaaagtctgcaagtggatattcagacctctttgaggccttcgttggaaacgggatttcttcatattctgctaaacagaagaattctcagtaacttccttgtgttgtgtgtattcaactcacagagttgaacgatcctttacacaaagcagacttgaaacactctttttgtggaatttgcaagtggagatttcagccgctttgaggtcaatgttagaataggaaatatcttcctatagaaactagacagaaatgattctcagaaactcctttgtgatgtgtgcgttcaactcacagagtttaacctttcttttcatagagtagttaggaaacactctgtttgtaatgtctgccagtggatattcagacctctttgaggccatcgttggaaacgggatttcttcatattatgctagacagaagaattcccagtaacttccttgtgttgtgtgtgttcaactcacagagttgaactttcatttacacagagcagatttgaaacactctttttgtggaatttgcaagtggagatttcacgcgctgtgaggccaaaggcagaaaaggaaatatcttcgtataaaaactagacagaatcattctcagaaactgctctgcgatgtgtgcgttcaactctcagagtttaacttttcttttcattcagcagtttagaaacactctgtttgtaaagtctgcacgtggatattttgaccatttagaggctttcgttggaaacgggtttttttcttgtaaggctagacagaagaattcccaggaacttccttgtgttgtgtacattcaactcacagagttgaacgttcccttagacagagcagatttgaaacactctttttgtgcaattggcaagtggtgatttcagccgctttgaggtcaatggtagaaaaggaaatatcttcgtataaaaactagacagaatgattctcagaaacttcattgtgacgtgtgcgttcaactcacagagtttatcctttcttttcatagagcagttaggaaacactctgtttgtaaagtctgcaagtggatattcagacctctttgaggccttcgttggaaacgggatttcttcatactgtgctagacagaagaattctcagtaactgccttgtgttgtgtgtattcaactcacagagttgaacgatcctttacacagagcagacttgaaacactccttttgtggaatttgcaattggagatttcagccgctttgaggtcaatggtagaataggaaatatcttcctatagaaactagacagaatgattctcagaaactcctttgtgatgtgtgtgttcaactcacagagtttaacctttcttttcatagagcagttagtaaacactctgtttataaatctgcatgtggatattcagatctctttgaggccttcgttggaaacgggatttcttcatattatgctagacagaagaattctcagtaacttccttgtgttgtgtgtattcaactgacagagttgaactttcatttacagagagcagatttgaaacactgctttgtggaatttgcaagtggagatttcaagcgctttggggccaaaggcagaaaaggaaatatcttcgtataaaaactagacagaatgattctcagaaactcctttgtgacgtgtgcgttcaactcacagagtttaacttttcttttcatagagcagttaggaaacactctgtttgtaaagtctgcaagtggatattcagacctctttgaggccttcgttggaaacgggatttcttcatattctgctagacagaagaattctccctaacttccttgtgttgtgtgtattcaactcacagagttgaacgatcctttacacagagcagacttgaaacacactttttgtggaatttgcaattggagatttcagccgcgttgaggtcaatggtagaaaaggaaatatcttcgtataaaaactagacagaatcattctcagaaacttctttgtgatgtatgcgttcaactcacagagtttaaccttccttttcatagagcagttaggaaaccctctgtttgtaaactctgcaagtggatattcagacctctttgaggccttcgttggaaacgggatttcttcatactatgctagacagaagaattcccagtaacttccttgtgttgtgtgcgttcaactcacagagttgaactttgatttacacagagcagatttgaaacactctttttgtggaatttgcaagtggagatttcaagcgctttgaggccaaaggcagaaaaggaaatatcttcgtataaaaactagacagaatcattctcagaaactgctgcttgatgtttgcgttcaactctcagagtttaacttttcttttcattcagcggtttggaaacactctgtttgtaaagtctgcacgtggatattttgaccacttagaggccttcgttggaaacgggtttttttcatgtaaggctagacagaagaattcccagtaacttccttgtgttgtgtacattcaactcacagagttgaacgttcccttagacagagcagatttgaaacactctttttgtgcaattggcaagtggagatttcaagagttttaaggtcaatggcagaaaaggaaatatctgcgtttcaaaactagacagaatcattcccacagactgcgttgtgatgtgttcgttcaaatcacagagtttaacctttcttttcatagagcagttaggaaacagtctgtttgtaaattctgtaagtggattttctgacaacttgtggccttcgttggaaacgggatttcttcatattctgctagacagaagaattctcagtaacttccttgtgttgtgtgtattcaactcacagagttgaacgatcctttacacagagcagacttgaaacactctttttgtggaatttgcaagtggagatttcagccgctttgaggtcaaaggtagaataggtaatatcttcctatagaaactagacagaatgattctcagaaactcctttgtgatgtgtgcgttcaactcacagagtttaacctttctgttcacagagcagttaggaaacactctgtttgtaaagtctgcaagtggatattcagacctccttgaggccttcgttggaaacgggatttcttcgtattctgctagacagaagaattctcagtaacttccttgtgttgtgtgtattcaactgacagagttgaacgatcctttacacagagcagacttgaaacactctttttgtggaatttgcaagtggagatttcagccgctttgaggtcaatggtagaaaaggaaatatcttcgtataaagactagacagaatcattctcagaaactgctctgcgatgtgtgcgttcaactctcagagtttaacttttcttttcattcagcagtttggaaacactctgtttgtaaagtctgcacgtggatattttgaccatttagaggccttcgttggaaacgggtttttttcttgtaaggctagacagaagaattcccaggaacttccttttgttgtgtacattcaactcacagagttgaacgttcccttagacagagcagatttgaaacactctttttgtgcaattggcaagtggtgatttcagccgctttgaggtcaatggtagaaaaggaaatatcttcgtataaaaactagacagaatgattctcagaaactcctttgtgatgtgtgtgttcaactcacagagtttaacctttcttttcatagagcagttaggaaacactctgtttgtaaagtctgcaagtggatattcagacctctttgaggccttcgttggaaacgggtttttttcatattaggctagacagaagaattcccagtaacttccttgtgttgtgtgtgttcaactcacagagttgaacttcatttaaacagagcagatttgaaacactctttttgtggaatttgcaagtggagatttcaagcgctttgaggccaaaggcagaaaaggaaatatcttcgtaaaaaaatagaaagaatcattctcagaaactgctctgcgatgtgtgcgttcaactctcagagtttgacttttcttttcattcagcagtttggaaacactctgtttgtaaagtctgcacgtggaaaatttgaccacttagaggccttcattggaaacgggtttttttcatgtaaggctagacagaagaattctcagtaacttccttgtgttgtgtgtattgaactcacagagttgaacgatcctttacacagagcagacttgtaacactctttttgtggaatttgcaagtggagatttcagccactttgaagtcaaaggtagaaaaggaaatatcttcctataaaaactagacagaatcattccaagaaactgcgttgtcatgtgttcgttcaactcacagagtttaacctttctgttcatagagcagttaggaaacactctgtaaagtttgtaagtggatattctgacatcttgtggccttcgttggaaacgggatttcttcatattctgctagacagaagaattctcagtaacttccttgtgttgtgtgtattcaactcacagagttgaacgatcctttacacagagcagacttgaaacactcattttgtggaatttgcaagtggagatttcagccgctttgaggtcaatggtagaaaaggaaactatcttcatataaagactagacagaatgattctgagaaactcctttgtgatgtgtgcattcaactcacagagtttaacctttcttttcatagagcagttaggaaacactctgtttgtaaagtctgcaagtggatattcagacctccttgaggccttcgttggaaacgggatttcttcatattctgctagacagaataattctcagtaacttccttgtgttgtgtgtattcaactcacagagttgaaggatcctttacagagagcaggcttgaaacactctttttgtcgaatttgcaagtggagatttcagccgctttgaggtcaatggtagaataggaaatatcttcttatagaaagtagacagaacgattctcagaaactcctttgtgatgtgtgcgatcaactcacagagtttaacctttcttttcatagagcagttaggaaacactctgtttgtaaagtctgcaagtggatattcagacctccttgaggccttcgttggaaacgggatttcttcatattctgctagacagaagtattctcagtaacttccttgtgttgtgtgtattcaactcacagagttgaacgatcctttacaaagagcagacttgaaacactctttttgtggaatttgcaagtggagatttcagccgctttgaggtccatggtagaaaaggtaatatcttcctataaagactagacagaatgattctcagaaactcctttgtgatgtgtgcgttcaactcacagagtttaacctttctgttcatagagcagttaggaaacactctgtttgtatagtctgcaagtggatattcagacctccttgaggccttcgttggaaacgggatttcttcatattctgctagacagaagaattctcagtaacttccgcgtgttgtgtgtattcaactcagagagttgaacgatcctttacacagagcagacttgaaacactctttttgtggaatttgcaagtggagatttctgccgctttgaggtcaatggtagaaaaggaaatatcttcctataaaaactagacagaatgattctcataaactcctttgtgatgtgtgcattcaactcactgagtttcacctttcttttcatagagcagttaggaaacactctgtttgtaaagtctgcaagtggatattcagacctccttgaggccttcgttggaaacgggatttcttcatattctgctagacagaagaattctcagtaacttccttgtgttgtgtgtattcaactcacagagttgaacgatcctttacacagagcagacttgaaacactctttttgtggaatttgcaagtggagatttcagctgctttgaggtcaatggtagaaaaggaaatatcttcgtataaagactagacagaaatcattctcagtaaactgctctgcgatgtgtgcgttcaactctcagagtttaacttttcttttcattcagcagtttggaaacactctgtttgtaaagtctgcacgtggataacttgaccacttagaggacttcgttggaaacgggtttttttcctgtaaggctagacagaagaattcccactaacttccttgtgttgtgtacattcaactcacagaggtgaacgttcccttagacagagcagatttgaaacactctttttgtgcaattggcaagtggagatttcaagcgctttaaggtcaatggtagaaaaggaaatatcttcgtttcaaaactagacagaatgattctcagaaactcctttgtgatgtgtgcgttcaactcacagagtttaacctttcttttcatagagcatttgggaaacgctctgtttgtaaagtctgcaagtggatattcagacttctttgaggtcttcgttggaagcgggatttcttcatattctgctagacagaagaattctcagtaacttccttgtgttgtgtgtattcaactcacagagttgaacgatcctttacacagagcagacttgaaacactctttttgtggaatttgcaagtggagacttcagccgctttgaggtcaatggtagaataggaaatatcttcccatagaaactagacagaatgattctcagaaactcctttgtgatgtgtgcgttcaactcacagagtttaaccttccttttcatagagcagttaggaaacactctgtttgtaaagtctgcaagtgtatattcagacatccttgaggctttcgttggaaacgggatttcttcatattctgctagaaagaagaattcccagtaacttccttgtgttgtgtgtgttcaactcacagagttgaactttcatttacacagagcagatttgaaacactctttttgtggaatttgcaagtggagatttcaagcgctttgaggccaaaggcagaaaaggaaatgtcttcgtttcaaaactagacagaatcattctcagaaactgctctgcgatgtgtgcgttcaactctcagagtttaacttttcttttcattcagaagtttggaaacactctgtttgtaaagtgtgcacgtggataacttgaacacttagaggccttcgttggaaacgggtttttttcatgtaaggctagacagaagaattcccactaacatccttgtgttgtgtgtgttcaactcacagagttgaactttcatttacacagagcagatttgaaagactctttttgtgcaatttgcaaatggagatttcaagcgctttgaggccaaagacagaaaaggaaatatcttcgtttcaaaactagacagaatcattcccacaaactgcgttgtgatgtgttcgttcaactcacagagtttaacctttctgttcatagagcagttaggaaacactctgtttctaaagtctgtaagtggatattctgacatcttgtggccttcgttggaaacggggtttcttcatattctgctagacagaagaattctcagtaacttccttgtgttgtgtgtattcaactcacaccgttgaacgatcctttatacagagcagacttgaaacactgtttttgtggaatttacaagtggagatttcagccgatttgaggtcaatggtagaaaaggaaatatcttcctatagaaactagacagaatgattctcagaaactcctttgggatgtgtgtgtccaactcacagagtttaacctttcttttcatagagcagttaggaaacactctgtttgtaaagtctgcaagaggatattcagacctctttgaggccttcgttggaaacgggtttttttcatataaggctagacagaagaattcccagtaacttccttgtgttgtgtgtgttcaactcacagagttgaactttcatttacacagagcagatttgaaacactctttttgtggaatttgcaggtggagatttcaagtgctttgaggccaaaggcagaaaaggaaatatcttcgtataaaaactagacagaatgattctcagaaactcctttgtgatgtgggtgttcaactcacagtgtttaacctttcttttcatagagcagtttggaaacactctgtttgaaaagtctgcacgtgtataatatgaccacttagaggccttcgttggaaacgggttttttttcatgtaaggctagacagaagaattcccagtaacttccttgtgttgtgtgcattcaactcacagagttgaacgttcccttagacagagcagatttgaaacactctatttgtgcaatttgcaagtgtagttttcaagctctttaaggtcaacagcagaaaaggaaatatcttcgtttcaaaactagacagaatcattcccacaaactgcgttgtgatgtgttcgttcaactcacagagtttaacctttcttttcatagagcagttaggaaacagtgggtttgtaaattctgtaagtggatattctgacatcttgtggccttcgttggaaacgggatttcttcatattctgctagacagaagaattctcagaaacttccttgtgttgtgtgtattcaactcacagagttgaacgatcctttacacagagcagacttgaaacactctttttgtggaatttgcaagtggagatttctgccgctttgaggtcaatggtagaatagtaaatatcttcctatagaaactagacagaatggttctgagaaatcctttgtgaggtgtgcgttcaactcacagagtttaacctttcttttcatagagcagttaggaaacactctgtttttaaagtcttcaagtggatattcagacctccttgaggccttcgttggaaacgggatttcttcatattatgctagacagaagaattctcagtaacttccttgtgttgtgtgtattcaactcacagagttgaacgatcctttacacagagcagacttgaaacactctttttgtggaatttgcaagtggagatttcagccgctttgaggtcaatagtagaaaaggaaatatcttcatagaaaaactagacagaatgattctcagaaactcctttgtgctgtgtgcgttcagctcacagagtttaacctttcttttcatagagtagttaggaaacactctgtttgtaaagtctgcaagtggatattcagacatctttgaggccttcgttggaaacgggatttcttcatattctgctagacagaagaattctcagtaacttccttgtgttgtgtgtattcaactgacagagttgaactttcatttagagagagcagatttgtaacactgtttttgtggaatttgcaagtggagatttcaagcgctttggggccaaaggcagaaaaggaaatatcgtcgtataaaaactagacagaatcattctcagaaactgctgcgtgatgtgtgcgttcaactctcagagtttaacttttcttttcattcagcggtttggaaacactctgtttgtaaagtctgcacgtggaaattttgaccacttagaggccttctttggaaacgggtttttttcatgtaaggctagacagaagaattcccagtaacttccttgtgttgtgtgcattcaactcacagagttgaacgttcccttagacagagcagatttgaaacactctatttgtgcaatttgcaagtgtagttttcaagctctttaaggtcaacggcagaaaaggaaatatcttcgtttcaaaactagacagaatgattctcagaaactcctttgtgatgtgtgtgttcaactcacagagtttaacctttcttttcatagagcagttactaaacactctgtttataaagtctgcaagtggatattcagacccctttgaggccttcgttggaaacgggatttcttcatattatgctagacagaagaattctcagtaacttccttgtgttgtgtgtattcaactcacagagttgaacgaacctttacacagagcagacttgaaacactctttttgtggaatttgcaagtggagatttcatcccctttgaggtcaatggtagaaaaggaaatatcttcgtataaaaactagacagaatgattctcataaacttctttgtgatgtgtgcgttcaactcacagagtttaacctttcttttcatagagcagttaggaaacactctgtttgtaaactctgcaagtggatattcagacctctttgaggccttcgttggaaacgggatttctccatactgtgctagacagaagaattcccagtaacttccttgtgttgtgtgtgttcaactcacagagttgaactttcatgtacacagagcagatttgaaacactctttttgtggaatttgcaaatggagatttcaagcgctttgaggccaaaggcagaaaaggaaatatcttcgtataaaaactagacagaaatcattctcagaaactgctctgcgatgtgtgcgttcaactctcaggagtttaacttttcttttcattcagcagtttggaaacactctgtttgtaaagtctgcacgtggatattttgaccacttagaggccttcgttggaaacgggtttttttcctgtaaggctagacagaagaattcccagtaacttccttgtgttgtgtacattcaactcacagagttgaacgttcccttagacagaacagatttgaaacactctttttgtgcaattggcaaatggagatttcaagcgctttgaggtcaatggtagaaaaggaaatatcttcgtttcaaaactagacagaatcattcccacaaactgcgttgtgatgtgttcgttcaactcacagagtttaacctttcttttcatagagtagttaggaaacagtctgtttgaaaattctgtaagtagatattctgacagcttgtggccttcgttggaaacgggatttcttcatattctgctagacagacgaattctcagtaacttccttgtgttgtgtgtattcaactcacagagttgaacgatcctttacacagagcagacttgtaacactctttttgtggaatttgcaagtggagatttcagcccctttgaagtcaaaggtagaaaaggaaatatcttcctataaaaactagacagaatgattctcagaaacttctttttgatgtgtgcgttcaactcacagagtttaacctttcttttcatagagcagttaggaaacactctgtttgtaaactctgcaagtggatattcagacctgtttgaggccttcgttggaaacgggatttcttcatactatgctagacagaagaattctcagtaacttccttgtgttgtgtgtattcaactcacagagttgaacgatcctttacacagagcggacttgaaacacactttttgtggaatttgcaagtggagatttcagccgcgttgaggtcaatggtagaaaaggaaatatcttcgtttcaaaactagacagaatgattctcagaaactcctttgtgatgtgtgcgttcaactcacagagtttcacttttcttttcatagagcagttaggaaacactctgtttgtaaagtctgcaagtggatattcagacctctttgaggccttcggtggaaacgggatttcttcatattatgctagacagaagaattcccagtaacttccttgtgttgtgtgtgttcaactcacagagttgaactttcatttacacagagcagatttgaaacactcttttcgtgaaatttgcaagtggagatttcaagcgctttgaggccaaaggcagaaaaggaaatatcttcgtataaaaactagacagaataattctcagaaactgctctgtgatgtgtgcgttcatctctcagagtttaactgttcttttcattcagcagtttggaaacactctgtttgtaaagtctgcacgtggatattttgaccacttagaggccttcgttggaaacgggtttttttcatgtaaggctagacagaagaattcccagtaacttccttgtgttgtgtacattcaactcacagagttgaacgttcccttagacagagcagatttgaaacactctttttgtgcaattggcaagtggagatttcaagcgctttaaggtcaatggcagaaaaggaaatatcttcgtttcaaagctagacagtatgattctcagaaacttctttgtgatgtgtgcgttcaactcacagagtttaacctttcttttcatagagcagttaggaaacactctgtttgtaaactctgcaagtggatattaagacctctttgaggccttcgttggaaacgggatttcttcatactgtgctagacagaagaattctcagtaacttccttgtgttgtgtgtattcaactcacagagttgaacgatcctttacacagagcggaattgaaacactctttttgtgaaacttgcaagtggagatttcagccgcgttgaggtcaatggtagaaaaggaaatctcttcgtataaaaactagacagagtgattctcagaaactcctttgtgatgtctgcgttcaactcaccgagtttaacctttcttttcatagagcagttaggaaacactctgtttgtaaagtctgcaagtggatattcagacctccttgaggccttcgttggaaacgggatttcttcatattctgctatacagaagaattcccagtaactttccttgtgttgtgtgtgttcaactcacagagttgaactttcatttacacagagcagatttgaaacactctttttgtggaatttgcaagtggagatttcaagcgctttgaggccaaaggcagaaaaggaaatatctccgtttcaaaactagacagaatcattctcagaaactgctctgcgatgtgtgcgttcaactctcagagtttaacttttcttttcattcagcagtttggaaacactctgtttgtaaagtctgcacgtggatattttgaccatttagaggccttcgttggaaacgggttttttttcttgtaaggctagacagaagaattcccaggaacttccttgtgttgtgtacattcaactcacagagttgaacgttcccttagacagagcagatttgaaacactctttttgtgcaattggcaagtggtgatttcagccgctttgaggtcaatggtagaaaaggaaatatcttcgtataaaaactagacagaatcattcccacaaactgcgttgtgatgtgttcgttcaactcacagagtttaacctttctgttcatagagcagttaggaaacactctgtttgtaaagtctgcaagtggatattcagacctctttgaggccttcgttggaaacgggatttcttcatattctgctagacagaagaattctcagtaacttcattgtgttgtgtgtattcaactcacagatttcaacgatcctttacacagagcagacttgaaacactctttttctggaatttgcaagtggagatttcagccgctttgaggtcaatggtagaataggaaatatcttcctatagacactagacagaatgattctcagaaactcctttatgatgtgtgcgttcaactcacagagtttaacctttctgttcatagagcagttaggaaacactctgtttgtaaagtctgcaagtggatattcagacctccttgaggccttcggtggaaacgggatttcttcatattctgctagacagaagaattctcagtaacttccttgtgttgtgtgtattcaactcacagagttgaacgatcctttacacagagcagacttgaaacactctttttgtggaatttgcaagtggagatttcagccgatttgagttcaatggtagaataggaaatatcttcctatagaaactagacagaatgattctcagaaactcctttgtgatgtgtgcgttcaactcatagagtttaacctttcttttcatagagcagttaggaaacactctgtttgtaaagtctgcaagtggatattcagacctctttgaggccatcgttggaaacgggatttcttcatattctgctagagagaagaattctcagtaacttccttgtgttgtgtgtattcaactcacagagttgaacgatcctttacacagagcagacttgaaactctctttttgtggaatttgcaagtggagatttcagccgctttgaggtcaatagtagaaaagtaaatatcttcgtagaaaaactagacagaatgattctcagaaactcttttgtgatgtgggcgttcaactcacagagtttaaccattcttttcatagagcagttaggaaacactctgtttgtaaagtctgcatgtggatatttggacttctttgaggccttcgttggaaacgggtttttttcatgtaaggctagacagaagaattctcagtaacttccttgtgttttgtgtattcaactcacagagttgaacgatcctttacacagagcagacttgaaacactctttttgtggaatttgcaagtggatatttcagccgctttgagttcaatggtagaataggaaatatcttcctatagaaactagacagaatgattctcagaaactcctttgtgatgtgtgcgttcaactcacagatttcaacctttcttttcatagagcagttgggaaacactctgtttgtaaagtctgcaagtggatattcagacttctttgaggccttcgttgaaagcgggatttcttcatattctgctagacagaagaattctcagtaacttccttgtgttgtgtgtattcaactcacagagttgcacgatcgtttacacagagcagacttgaaacactctttttgtggaatttgcaagtggagatttcagccgctttgaggtcaatagtagaaaaggaaatatcttcgtagaaaaactacacagaatgattctcagaaactcctttgtgatgtgggtgttcaactcacagagtttaacctttcttttcatagagcagttaggaaacactctgtttgtaaagtctgcaagtggatattttcacctctttgaggccttcattggaaacgggttttttttcatgtaaggctagacagaagaattctcagtaacttccttgtgttgtgtgtattcaactgacagagttgaactttcatttagacagagcagatttgaaacactctttttctggaatttgcaagtggagatttcaagcgctttgaggccaaaggcagaaaaggaaatatcttcgtataaaaactacacagaatcattctcagaaactgctctgcgatgtgtgcgttcaactctcagagtttaacttttcttttcattcagcagtttggaaacactctgtttgtaaagtctgcacgtggatattttgaccatttagaggccttcgttggaaacgggttttgtccttgtaagcctagacagaagaattcccagtaacttccttgtgttgtgtgcattcaactcacagagttgaacgttcccttagacagagcagatttgaaacactctatttgtgcaatttgcaagtgtagttttcaagctctttaaggtcaacggcagaaaaggaaatatcttggtttcaaaactagacagaatgattctcagaaactcctttgtgatgtgtgcgttcaactcacagagtttaaccttactgttcatagagcagttaggaaacactctgtttgtaaagtctgcaagtggatattcagacctctttgaggccttcgttggaaacgggatttcttcatattatgctagacagaagaattctcagtaacttccttgtgttgtgtgtattcaactcacagagttgaacgatcctttacacagagcagacttgaaacactctttttgtggaatttgcaagtggagatttcagccgctttgagttcaatggtagaataggaattatcttcctacagaaactagacagaatgattctcagaaactcctttgtgatgtgtgtgttcaactcacagagtttaagctttcttttcatagagcagttagtaaacactctgtttataatgtctgcaagtggatattcagacccctttgacgccttcgtttgaaacgggatttcttcatattatgctagacagaagaattctcagtaacttccttgtgttgtgtgtattcaactgacagagttgaactttcatttagagagagcagatttgaaacactgtttttgtggaatttgcaagtggagatatcaagcgccttggggccaaaggcagaaaaggaaatatcttcgtataaaaagtagacagaatgattctcagaaacttctttgtgatgtgtgcgttcaactcacagagtttaacctttcttttcatagagcagttaggaaacactctgtttgtaaactatgcaagtggatattcagacctctttgaggccttcgttggatacgggatttcttcatactatgctagacagaagaattctcagtaacttcccttgtgttgtgtgtattcaactcacagagttgaacgatcctttacacagagcagacttgaaacattctttttgtggaatttgcaaggggagatttcagccgctttgaggtcaatggtagaataggaaatatcttcctatagaaactagacagaatgattttcagaaactgctttgtgatgtgtgcgttcaactcacagagtttcacctttcttttcatagagcagttaggaaacactctgtttgtaaagtctacaagtggatattcagacctctttgaggccttcgttggaaacgggatttcttcatattatgctagacagaagaattctcagtaacttccttgtgttgtgtgtattcaactgacagagttgaactttcatttggagagagcagatttgaaacactgtttttttggaatttgcaagtggagatttcaagcgctttggggccaaaggcagaaaaggaaatatcttcgtataaaaactagacagaatcattctcagaaactgctctgtgatgtgtacgttcaactctcagcagtttaacttttcttttcattcagcagtttggaaacactctgttcgtaaagtctgcacgtggataatttgaccacttagaggccttcgttggaaacgggtttttttcatgtaaggctagacagaagaattctcagtaacttccttgtgttgtgtgtattcaactcacagaattgaacgatcctttacacagagcagacttgaaacactctttttgtggaatttgcaagtggagatttcagccgctttgaggtcaatagtagaaaaggaaatatcttcgtagaaaaactagacagaatgattctcagaaaatgttttgtgatgtgtgcgttcaactcacagagtttaacttttcttctcatagagcagttaggaaacactctgtttgtaaagtctgcaagtggatattgagacctctttgaggccttcgttggaaacgggatttcttcatattatgctagacagaagaattctcagtaacttccttgtgttgtgtgtattcaactgacagagttgaactttcatttagagagagcagatttgaaacactgtttttgtggaatttgcaagtggagatttcaagcgctttgaggtcaatggtagaataggaaatatcttcctatagaaactagacagaatcattctcagaaactgctgcgtgatgtgtgagttcaactctcagagtttaacttttcttttcattcagcggtttggaaacactctgtttgtaaagtctgcacgtggaaattttgaccacttagaggccttcgttggaaacgggttttcttcatgtaaggctagacagaagaattcccagtaacttccttgtgttgtgtacattcaactcacagagttgaacgttcccttagacagagcagatttgaaacactctttttgtgcaattggctagtgttgatttcagccgctttgaggtcaattgtataaaaggatatatcttcatataaaaactagacagaatgattctcagaaactcctttgtgatgtgtgcgttcaactcacagagtttaacctttctttccatagagcagttaggaaacactctgtttgtaaagtctgcaagtggatattcagacctctttgaggccttcgttggaaacgggtttttttcttataaggctagacagaagaattctcagtaacttccttgtgttgtgtgtattcaactcacagagttgaacgatcctttacacagagcagacttgaaacactctgtttgtggaatttgcaagtggagatttcagccgctttgaggtcaatagtagaaaaggaaatatcttcgtagaaaaactagacagaatgattctcagaaactcctttgtgatgtgtgcgttcaactcacagagtttaaactttcttttcatagagcagttaggaaacactctgtttgtaaagtctgcaagtggatattcagacctctttgaggccttcgttggaaacgggtttttttcatataaggctagacagaagaattcccagtaacttccttgtgttgtgtgtgttcaactcacagagttgaactttcatttacacagaaaagatttgaaacactctttttgtggaatttgcaagtggagatttcaagcgctttgaggccaaaggcagaaaaggaaatatctccgtttcaaaactagacagaatcattctcaaaaactgctctgcgatgtttgcgttcaactctcagagtttaacttttcttttcattcagcagtttggaaacactctgtttgtaaagtctgcacgtggataacttgaccacttagaggacttcgttggaaacgggtttttttcctgtaaggctagacagaagaattcccagtaacttccttgtgttgtgtacattcaactcacagagttgaacgttcccttagacagagcagatttgaaacactctttttgtgcaattggcaaatggagatttcaagcgctttaagttcaatggcagaaaaggaaatatcttcgtttcaaaactagacagaatcattctcagaaactgctctgcgatgtgtgcgttcaactctcagagtttaacttttcttttcatagagcagttaggaaacagtctgtttgtcaattctgtaagtggatattctgacatcttgtggccttcgttggaaacgggatttcttcatattctgctagacagaagaattctcagaatcttccttgtgttgtgtgtattcaactcacagatttgaacgatcctttacacagagcagacttgaaacactctttttgtggaatttgcaagtggagatttcagccgctttgaggtccatggtagaaaaggaaatatcttcgtataaaaactagacagaatgattctcagaaactcctttgtgatgtgtgcgttcaactcacagagtttaacctttcttttcatagagcagttaggaaacactctgtttgtaaagtctgcaagttgatattcagacctctttgaggccttcgttggaaacgggatttcttcatattatgctagacagaagaattctcagtaacttccttgtgttgtgtgtattcaactcacagagttgaacgatcctttacacagagcagacttgaaacactctttttatggaatttgcaagtggagatttcagccgctttgaggtcaatggtagaaaaggaaatatcttcgtataaaaactagacagaatgattctcataaactcctttgtgatgtgtgcgttcaactcacagagtttaacctttcttttcatagagcagttaggaaacactctctttgtgaagtctgcaagtggatattcagacctccttgaggccttcgttggaaacgggatttcttcatattctgctagacagaagaattctcagtaacttccttgtgttgtgtttattcaactcacagagttaatgatcctttacacagagcagacttgaaacactctttttgtggcatttgcaagtggagatttcagccgctttgaggtcaatggtagaaaagtaaatatcttcgtataaagactagacagaatcattctcagaaactgctctgcgatgtgtgcgttcaactctcagagttcaacttttcttttcattcagcagtgtggaaacactctgtttgtaaagtctgcacgtggatattttgaccacttagaggcctttgttggaaacgggtttttttcctgtaaggctagacagaagttttcccagtaacttccttgtgttgtgtacattcaactcacagagttgaacgttcccttagacagagcagatttgaaacactctttttgtgcaattggcaaatggagatttcaagcgctttaaggtcaatggcagaaaaggaaatatcttcgtttcaaaactagacagaatcattcccacaaactgcgttgtgatgtgttcgttcaactcacagagtttaacctttctgttcatagagcagttaggaaacactctgtttgtaaagtctgtaagtggatattctgacatcttgtggccttcgttggaaacgggatttcttcatattatggtagacagaagaattctcagtaacttccttgtgttgtgtgtattcaactcacagagttaaacgatcctttacacagagcagacttgaaacactctttttgtggaatttgcaagtggagatttcagccgctttgaggtcaatggtagaaaaggaaactatcttcatataaacactagacagaatgattctcagaaactcctttgtgatgtgtgtgttcaactcacagagtttaacctttcttttcatagagcagttagtaaacactctgtttataaagtctgcaagtagatattcagacccctttgaggccttcgttggaaacgggatttcttcatattatgctagacagaagaattctcagtaacttcccttgtgttgtgtgtattcaactcacagagttgaacgatcctttacacagagcagagttgaaacattctttttgtggaatttgcaagtggagatttcagccgctttgaggtcaatggtagaatagcaaatatcttcctatagaaactagacagaatgattctcagaaactcctttgtgatgtgtgcattcaactcacagagtttaacctttcttttcatagaacagttaggaaacactctgtttgtaaagtcttcaggtggatattcagacctcttagaggccttcgttggaaacaggatttcttcatattatgctagacagaagaattctcagcaatcttccttgtgttgtgtgtattcaactcacagagttgaacgatggtttacacagagcagatttgaaacactctttttgtggaatttgcaagtggagatttcagccgctttgaggtcaatggtagaaaaggaaatatcttcctataaaaactagacagaatgattctcagaaactcctttgtgatgtgtgcgttcaactcacagagtttcacttttcttttcatagagcagttacgaaacactctgtttgtaaagtcttcaagtggatattcagacctctttgaggccttcgttggaaacgggatttcttcatattctgctacacagaagaattctcagtaacttccttgtgttgtgtgtattcaactcacagagttgaacgatcctttacacagagcagacttgaaacactctttttgtggaatttgcaagtggagatttcagccgctttgaggtcaatggtagaaaaggaaactatcttcatataaagactagactgaatcattctcagaaactgctctgtgatgtgtgcattcaactctcagagtttaacttttcttttcattcagcagtttggaaacactctgtttgtaaagtctgcacgtggataatttgaccacttagaggccttcgttggaaacgggtttttttcatgtaaggctagacagaagaattctcagtaacttccttgtgttgtgtgtattcaactcacacagttgaacgatcctttacacagagcagacttgtaacacactttttgtggaatttgcaagtggagatttcagccgctttgaagtcaaaggtagaaaaggaaatatcttcctataaaaactagacagaatgattctcagaaactcctttgtgatgtgtgcgttcaactcacagagtttaacctttcttttcatagagcagttaggaaacactctgtttgaaaagtctgcaagtggatattcagacctcttagaggccttcgttggaaacgggatttcttcatattatgctagacagaagaattttcagtaacttccttgtgtagtgtgtattcaactcacagagttgaacgatcctttacacagagcagacttgaaacactctttttgtggaatttgcaagtggagatttcagccgctttgaggtcaatggtagaaaaggaaatatcttcgtataaagacaagacagaatgattctcagaaactcctttgtgatgtgtgcgttcaactcacagagtttaacctttcttttcatagagcacttaggaaacactctgtttgtaaagtctgcaagtggatattcagacctctttgaggccatcgttggaaacgggatttcttcatattctgctagacagaagaattctcagtaacttccttgtgttgtgtgtattcaactcacagagttgaacgatcctttacacagagcagacttgaaacactctttttgtggaatttgcaagtggagatttcacccgctttgaggtcaatggtagaaaaggaaatatcttcgtataaagactagactgaatgattctcagaaactcctttgtgatgtgtgcgttcaactcacagagtttaacctttcttttcatagagcagttaggaaacactctgtttgtaaagtctgcaagtggatattcagacctccttgaggccttcattggaaacaggatttcttcatattctgctagacagaagaattctcagtaacttccttgtgttgtgtgtattcaactcacagagttgaacgatcctttacagcagagcagacttgaaacactctttttgtggaatttgcaagtggagatttcagccgctttgaggtcaatggtagaaaaggaaatatcttcctataaagactagacagagtgattctcagaaactcctttgtgatgtctgcgttcaactcacagagtttaacctttcttttcatagagcagttaggaaacactctgtttgtaaagtctgcaagtggatattcagaccttcttgaggccttcgttggaaacgggatttcttcatattatgctagacagaagaattctcagtaacttccttgtgttctctgtattcaactcacagagttgaacgatcctttacagagagcagacttgaaacactctttttgtggaatttgcaagtggagatttcagccgctttgaggtcaatggtagaaaaggaaatatcttcgtataaagactagacagaatgattctcagaaactcctttgtgatgtgtgcgttcaactcacagagtttaacctttgttttcatagagcagttaggaaacactctgtttgtaaagtctgcaagtggatattcagacatctttgaggccttcgttggaaacgggatttcttcatgttctgctggacagaagaattctcagaatcttccttgtgttgtgtgtcttcaagtcacagagttgaacaatggtttacacagagcagatttgaaacactctttttgtggaatttgcaagtggagatttcagccgctttgaggtcaatggtagaaaaggaaatatcttcgtataaaaactagacagaatgattctcagaaactcctttatgatgtgtgcgttcaactcacagagtttaacctttcttttcatagagcagttaggaaacactctgtttgtaaactctgcaagtggatattcagacctctttgaagccttggttggaaacgggatttcttcatattatgcctgagagaagaattctcagtaactgccttgtgttgtgtgtattcaactcacagagttgaatgatcctttacacagagcagacttgaaacactccttttgtggaatttgcaagtggagatttcagccgctttgaggtcaatggtagaataggaaatatcttcctatagaaactagacagaatgattctcagaaactcctttgtgatgtgtgtgttcaactcacagagtttaacctttcttttcatggagcagttaggaaacactctgtttgtaaagtctgcaaggggatattcagacctctttgaggcttccgttggaaacgggatttcttcatattctgctagacagaagaattctcagtaacttcattgtgttgtgtgtattcaactcacagagttgaacgatcctttacacagagcagacttgaaacactctttttgtggaatttgcaagtggagatttcagccgctttgaggtcaatggtagaaaaggaaatatcttcgtataaagactagacagaatgattctcagaaactcctttgcgatgtgtgcattcaactcacagagtttaacctttcttttcacagagcagttaggaaacactctgtttgtaaagtctgcaagtggatattcagacctccttgaggccttcgttggaaacgggatttcttcatattatgctagacagaagaattctcagaaacttccttgtgttgtgtgttttcaactcacagagttgaacgatggtttacacagagtagacttgaaacactctttttgtgtaatttgcaagtggagatttcagccgctttgaggtcaatggtagaaaaggaaatatcttcgtataaaaagtagacagaatgattctcagaaactcctttgtgatgtgtgcgttcaactcacagagtttaacttttcttttcatagagcagttaggaaacactctgtttgtaaaatctgcaagtggatattcagacctctttgaggccttcgttggaaacgggatttcttcatattatgctagacagaagaattcccagtaacttccttgtgttgtgtgtgttcaactcacagagttgaactttcatttacacagagcagatttgaaacactctttttgtggaatttgcaagtggagatttcaagcgctttgaggccaaaggtagaaaaggaaatatcttcgtataaaaactagacagaatcattctcagaaactgctgcgtgatgtgtgcgttcaactctcagagtttaacttttcttttcattcagcggtttggaaacactctgtttgtaaagtctgcacgtggatattttgaccacttagaggccttcgttggaaacgggtttcttgcatgtaaggctagacagaagaattcccagtaacttccttgtgttgtgtgtattcaactcacagagttgaacgttcccttagacggagcagatttgaaacactctatttgtgcaatttgcaagtgtagatttcaagcgctttaaggtcaatggcagaaaaggaaatatcttcgtttcaaaactagacagaatcattcccacaaactgcgttgtgatgtgttcgttcaactcacagagtttaacctttctgttcatagagcagttaggaaacactctgtttgtaaagtctgtaagtggatattctgacatcttgtggccttcgttttaaacgggatttcttcatattgtgctagacagaagaattctcagtaacttccttgtgttgtgtgtattcaactcacagagttgaactatcctttacagagagcagacttcaaacactctttttgtggaatttgcaattggatatttcagccgctttgaggtcaatggtagaaaaggaaatatcttcgtataaagactagacagaatgattctcagaaaatcttttgtgatgtgtgcgttcaactcacagagtttaacttttcttctcatagagcagttaggaaacactctgtttgtaaagtctgcaagtggatattcagacctctttgaggccttcgttggaaacgggattttttcatattatgctagacagaataattctcagtaacttccttgtgttctgtgtattcaactcacagagttgaacgatcctttacagagagcagacttgaaacactctatttgtggaatttgcaagtggagatttcagccgcattgaggtcaatggtacaaaaggaaatatcttcgtataaagactagacagaatgattctcagaaactcctttgtgatgtgtgcgttcaactcacagagtttaacctttcttttcatagagcagttaggaaacactctgtttctaaagtctgcaagtggatattcagacatccttgaggctttcgttggaaacgggatttcttcatattctgctagaaagaagaattctcagtaacttccttgtgttgtgtgtattcaactcacagtgttgaacgatcctttacacagagcagacttgaaacactctttttgtggaatttgcaagtggagatttcagccgctttgagttcaatggtagaataggaaatatcttcttatagaaactagacagaatgattctcagaaactcctttgtgatgtgtgcgttcaactcacagagttcaacctttcttttcatagagcagttgggaaacactctgtttgtaaagtctgcaagtggatattcagatttctttgaggccttcgttggaagcgggatttcttcatgttctgctagacagaacaattctcagtaacttccttgtgttgtgtgtattcaactcacagagttgaacgatcctttacacagagcagacttgaaacactctttttgtggaatttgtaagtggagatttcagccgctttgaggtcaatagtagaaaaggaaatatattcgtagaaaaactagacagaatgattctcataaactcctttgtgatgtgtgcgttcaactcacagagtttaacctttcttttcatagagcagttaggaaacactctgtttgtaaagtctgcaagtggatattcagacctcgttgaggccttcgttggaaacgggatttcttcatattctgctagacagaagaattctcagtaacttccttgtgttgtgtgtattcaactcacagagttgaacgatcctttacacagagcagactttaaatactctttttgtggaatttgcaagtggagatttcagccgctttgagttcaatggtagaataggaaatatcttcctatagaaactagacagaatgattctcagaaactcctttgtgatgtgtgcgttcaactcacagagtttaacctttcttttcatagagcagttaggaaacactctgtttgtatagtctgcaagtggatattcagacctctttgaggccttcgttggaaacgggtttttttcatataaggctagacagaagaattctcagtaacttccttgtgttgtgtgctttcaactcacagagttcaacgatcctttacacagagcagattagaaacactctttttgtggaatttgcaagtggagatttcagccactttgaggtcaatggtagaaaaggaaatatcttcgtataaaaactagacagattgattctcagaaaatcttttgtgatgtgtgcgttcaactcacagagtttaacttttcttctcatagagcagttaggaaacactctgtttgtaaagtctgcaagtggatattcagacctctttgaggccttcgttggaaacgggatttcttcatattatgctagacagaagaattctcagtaactttccttgtgttgtgtgtattcaactcacagagtagaacgatcctttacacagagcagacttgaaacactctttttgtggaatttgcaagtggagatttcaagcgctttgaggccaaaggcagaaaaggaaatatcttcgtataaaaactagacagaatgattctcagaaactcctttgtgatgtgtgcgttcaactcacagagttgaagttttcttttcttagagcagttaggaaacactctgtttgtaaagtctgcaagtggatattcagaactctttgaggccttcgttggaaacggggtttcttcatattctgctagacagaagaattctcagtaacttccttgtgttgtgtgtattcaactcacagagttgaacgatcctttacacagagcagacttgaaacattctttttgtggaatttgcaactggagatttcagccgctttgaggtcaacggtagaataggaaatatcttcctatagaaactagacacaatgattctgagaaactcctttgtgatgtgtgcgttcaactcacagagtttaacctttcttttcatagagcagttaggaaacactctgtttgtaaagtctgcaagtggatattcagacctccttgaggccttcgttggaaacgggatttcttcatattatgctagacacaataattctcaagtaacttccttgtgttgtgtgtattcaactcacagagttgaacgatcctttacagagagcagacttgaaacactctttttgttgaatttgcaagtggagatttcagccgctttgaggtcaatggtagaaaaggaaactatcttcgtataaagactagacagaatgattgtcagaaactcctttgtgatgtgtgcgttcaattcacagagtttaacctttcttttcatagagcagttaggaaacactctgtttgtaacgtctgcaagtggatattcagacatctttgaggctttcgttggaaacgggatttcttcatattctgctatacagaagaattcccagtaacttccttttgttgtgtgtgttcaagtcacagagatgaactctcatttacacagagcagatttgaaactctctttttgtggaatttgcaaatggagatttcaagcgctttgaggccaaaggcagaaaaggaaatatcttcctataaaaactagacagaatcattctcagaaacagctctgtgatgtgtgcgttcaactctcagagtttaacttttcttttcattcagcagtttggaaacactctgtttgtaaagtctgcacgtggatattttgaccacttagaggccttcgttggaaacgggttttttttcacgtaaggctagacggtagcattcccagtaacttccttgtgttgtgtgcattcaactcacagagatgaacgttcccttagacagagcagatttgaaacgctctatttgtgcaatttgcaagtgtagatttcaagcgctttaaggtcaatggcaaaaaaggaaatatcttcgtttcaaaactagacagaatcattcccacaaactgcgttgtgatgtgttcgttcaactcacagagtttaacctttctgttcatagagcagtgaggaaacactctgtttgtaaactctgtaagtggatattctgacatcttgtggccttcgttggaaaagggatttcttcatattctgctagactgaagaattctcagtaacttccttgtgttgtgtgtattcaactcacagaattgaacgatcctttacacagagcagacttgaaacactctttttgtggaatttgcaagtggagatttcagccgctttgaggtcaatggtagaaaaggaaatatcttcgtatggaaacaagacagaatgattctcagaaactcctttgtgatgtgtgcgttcaactcacagagtttaacctttcttttcatagagcagttgggaaacactctgtttgtaaagtctgcaagtggatattccgacatccttgaggctttcgttggaaatgggatttcttcatattctgctagaaagaagaattctcagtaacttccttgtgttgtgtgtattcaaaggacagagttgaactttcatttagagagagcagatttgaaacactgtttttgtggaatttgcaattggagatttcaagcgctttggggccaaaggcagaaaaggaaatatcttcgtataaaaactagacagaatcattctaagaaactgctgcgtgatgtgtgcgttcaactctcagagtttaacttttcttttcattcagcggtttggaaacactctgtttgtaaagtctgcacgtggatattttgaccacttagaggccttcgttggaaacgggtttttttcatgtaaggctagacagaagaattcccagtaacttccttgtgttgtgtacattcaacacacagagttgaacgttcccttagacagagcagatttgaaacactctttttgtgcaattggcaagtggagatttcaagcgctttaaggtcaatggcagaaaaggaaatatcttcgtttcaaaactagacagaatgattctcagaaactcctttgtgatgtgtgcgttcaactcacagagtttaacctttcttttcatagagcagttaggaaacactctgtttgtaaagtctgcaagtggatattctgacctctttgaggccttcgttggaaacgggatttcttcatattctgctagacagaagaattctcagtaacttccttgtgttgtgtactttcaactcacagagttgaacgttcctttacacagagcagattagaaacactctttttgtggaatttgcaagtggagatttcagccgctttgaggtcaatggtagaaaaggaaatatcttcataaaaaaactagacagaatgattctcagaaactcctttgtgatgtgtgcgttcaactcacagagtttaacctttcttttcatagagcagttaggaaacactccgtttgtaaagtctgcaagtggatattcagacctccttgaggccttcgttggaaacgggatttcttcatattatgctagacagaagaattctcagtaacttccttgtgttgtgtgtattcaactcacagagttgaacgatcctttgcacagagcagacttgaaacactctttttgtggaatttgaaagtggagatttcagccgctttgaggtcaatggtagaataggaaatatcttcctatagaaactagacagaatgattctcagaaactcctttgtgatgtgttcgttcaactcacagagttcaacttttcttttcatagagcagttgggaaacactctgtttgtacagtctacaagtggatattcagacctctttgaggccttcgttggaaacgggatttcttcatattctgcaagacagaagaattctcagtaacttccttgtgttgtgtgtattcaactcacagagttgaacgatcctttacacagagtagacttgaaacactccttttgtggaatttgcaagtggagatttcagccgctttgaagacaatggtagaataggaaatatcttcctatagaaactagacagaatgattctcagaaactcctttgtgatgtgtgcgttcaactcacagagtttaacttttgttttcatagagcagttaggaaacactctgtttgtaaagtcttcaagtggatatacagacctctttgaggccttcgttggaaacgggatttcttcatattctgctagacagaataattctcagtaacttccttgtgttgtgtgtattcaacccacagagttgaacgatcctttacagagagcagacttgaaacactctttttgtggaatttgcaagtggagatttcagccgctttgggtcaatggtagaataggaaatatcttcctatagaaactagacagaatgattctcagaaactcctttgtgatgtgtgtgttcaactcacagagtttaacctttcttttcatagagcagttagtaaacactctgtttataaagtctgcaagtggatattcagacccctttcaggccttcgttggaaacgggatttcttcatattctgctagacagaagaattcccagtaacttcccttgtgttgtgtgcattcaactcacagagttgaacgttcccttagacagagcagatttgaaacactctatttgtgcaatttgcaaatgtagatttcaagcgctttaaggtcaatggcagaaaaggaaatatcttcgtttcaaaactagacagaatcattcccacaaactgcgttgtgatgtgttcgttcaactcacagagtttaacctttctgttcatagagcagctaggaaacactctgtttgtaaagtctgtaagtggatattctgacatcttgtggccttcgttggaaacgggatttcttcatattctgctagacagaagaattctcagaatcttccttgtgttgtgtctattcaactcacagagttgaacgatcctttacacagagcagacttgaaacactctttttgtggaatttgcaagtggagatttcagccgctttgaggtccatggtagaaaaggaaatatcttcgtataaaaactagacagattgattctcagaaactcctttgtgatgtgtgcgttcaactcacagagtttaacctttcttttcatagagcagttaggaaacactctgtttgtaaagtctgcaagtggatattcagacctctttgaggccttcgttggaaacgggatttcttcatattctgctagacagaagaattctcagtaacttccttgtgttgtgtgtattcaactcacagagttgaacgatcctttacacagagcagacttgtaacactctttttgtggaatttgcaagtggagatttcagccgctttgaagtcaaaagtagaaaaggaaatatcttcctataaaaactagacagagtgattctcagaaactccttcgtgatgtctgcgttcaactcacagagtttaacctttcttttcatagagcagttaggaaacactctgtttgtaaagtctgcaagtggatattcagacctccttgaggccttcgttggaaacgggatttctacatattatgctagacagaagaattctcagtaacttccttgtgttgtgtgtattcaactgacagagttgaactttcatttagagagaggagatttgaaacactgtttttgtggaatttgcaagtggagatttcaagcgctttggggccaaaggcagaaaaggaaatatcttcgtataaaaactagacagaatcattctcagtaactgctctgtgatgtgtgcgttcaactctcagagtttaacttttcttttcattcaccagtttggaaacactcagtttgtaaagtctgcacgtggatattttgaccacttaggggtcttcgttggaaacgggtttttttcatgtaaggctagacagaagaattcccagtaacttccttgtgttgtgtgcattcaactcacagagttgaacgttcccttaggcagagcagatttgaaacactctatttgtgcaatttgcaagtgtagatttcaagcgctttaaggtcaacggcagaaaaggaaatatcttcgtctcaaaactagacagaatcattcccacaaactgcgttgtgatgtgttcgttcaactcacagagtttaacctttctgttcatagagcagttaggaaacactctgtttgtaaagtctgtaagtggatattctgacatcttgtggccttcgttggaaacgggatttcttcatagtctgctagacagaagaattctcagtaacttccttgtgttgtgtgtattcaactcacagagttgaacgatcctttacacagagcagacttgaaacactctttttgtggaatttgcaagtggagttttcagccgctttgaggtcaatggtagaataggaaatatcttcctatagaaactagacagaatgattctcagaaactcctttgtgatgtgtgcgttcaactcacagagtttaacttttcttttcatagagccgttaggaaacactctgtttgtaaagtctgcaagtggatattcagacctctttgaggccttctttggaaaagggatttcttcatattatgctagacagaagaattctcagcaacttccttgtgttgtgtgtattcaactcacagagttgaacgatcctttacacagagcagacttgtaacactctttttgtggaatttgcaagtggagatttcagccgctttgacgtcaaaggtagaaaaggaaatatcttcctataaaaactagacagaatgattctcagaaactcctttgtgatgtgtgcgttcaactcacagagtttaacctttcttttcatagagcagttagggaacactctgtttgtaaagtctgcaagtggatattcagacctctttgaggcctacgtaggaaacgggatttcttcatattatgctagacagaagaattctcagaaacttccttgtgttgtgtgtattcaactcacagagttgaacgatcctttacacagagcagacttgaaacactctttttctggaatttgcaagtggagatttcagccgctttgaggtcaatggtagaataggaaatatcttcctatagatactagacagaatgtttctcataaactcctttgtgatgtgtgcattcaactcaaagactttaacctttcttttcatagagcagttaggaaacactctgtttgtaaagtctgcaagtggatattcagacctccttgaggccttcgttggaaacgggatttcttcatattctgctagacagaagaattctcagtaacttccttgtgttgtgtgtattcaactcacagagttgaacgatcctttacacagagcagacttgaaacactctttttgtggaatttgcaagtggagatttcagccgctttgaggtcaatggtagaataggacatatcttcctatagaaactagacagaatgattctcagaaactcctttgtgatgtgtgcgttcaactcacagagtttaaccttactgttcatagagcagttaggaaacactctgtttgtaaagtctgcaagtggatattcagacctccttgaggccttcgttggaaacgggatttcttcatattctgctagacagaagaactctcagaatcttccttgtgttgtgtgtattcaacgcacagagttgaacgatcctttacacagagcagacttgaaacactctttttgtggaatttgcaagtggagatttcagccgctttgaggtccatggtagaaaaggaaatatcttcgtataaaaactagacagaatgattctcagaaacttcattgtgatgtgtgcgttcaactcacagagtttaacctttcttttcatagagcagttaggaaacactctgtttgtaaagtctgcaagtggatattcagacatccttgaggctttcgttggaaacgggatttcttcatattctgctagaaagaagaattctcagtaacttccttgtgttgtgtgtattcaactcacagagttgaacgatcctttacacagagcagacttgaaacactgtttttgtggaatttgcaagtggagatttcagccgctttgaagtcaatggtagaataggaaatatcttcctatagaaactagacagaatgattctcagaaactcctttgtgatgtgtgcgttcaactcacagagtttaacctttcttttcatagagcagttaggaaacactctgtttgtaaagtctgcaagtggatattcagacctccttgaggccttcgttggaagcgggatttcttcatgttcaggtagacagaagaattctcagtaacttccttgtgttgtgtgtattcaactcacagagttgaacgatcctttacacagagcagacttcaaacactctttttgtggaatttgcaagtggagatttcagccgctttgaagtcaatggtagaataggaaatatcttcctatagaaactagacagaatgattctcagaaactcctttgtgatgtgtgcgttcaactcacagagtttaacctttcttttctcagagcagttaggaaacactctgtttgtaaagtctgcaagtggatattcagacatctttgaggctttcgttggaaacggggtttcttcatattctgctagacagaagaattctcagtaacttccttgtgttgtgtgtattcaactcacagagttgaacgatcctttacacagagcatacttgaaacactctttttgtggaatttgcaagtggagatttcagccgctttgaggtcaatggtagaataggaagtatctccctatagaaactagacagaatgattctcagaaactcctttgtgatgtgtgcgttcaactcacacagtttaacctttcttttcatagagctgttaggaaacactctgtttgtaaagtctgcaagtggatattcagacctccttgaggccttcgttggaaacgggatttcttcatattatgctagacagaagaattcccagtaacttccatgtgttgtgtgtgttcaactcacagagttgaaatttcatttacacagagcagatttgaaacactctttttgtggaatttgcaaatggagatttcaagcggtttgaggccaaaggcagaaaaggaaatatcttcgtataaaaactagacagaatcattctcagaaactgctctgtgatgtgtgcgttcaactctcagagtttaactttccttttcattcagcagtttggaaacactctgtttgaaaagtctgctgctggataatttgaccactgagaggccatcgttggaaacgggttttttccatgtaacgctagacagaagaattctcagtaacttccttgtgttgtgtgtattcaactcacagagttgaacgatcctttacacagagcagacttgaaacactctttttgtagaatttgcaagtggagatttcagccgctttgaggtcaatggtagaataggaaatatcttcctttagaaactagacagaatgattctcagaaactcctttgtgatgtgtgcgttcaactcacagagtttaacttttcttttcatagagcagttaggaaacactctgtttgtaaagtctgcaagtggatattcagacatctttgaggctttcgttggaaacgggatttcttcatattctgctatacagaagaattcccagtaactttccttgtgttgtgtgtgttcaacttacagagttgaactttcatttacacagagcagatttgaaacactctttttgtggaatttgcaagtggagatttcaagcgctttgaggccaaaggcagaaaaggaaatatcttcgtataaaaactagacagaatcattctcagaaactgctctgtgatgtgtgcgttcaactctcagagtttaacttttcttttcattcagcaatttggaaacactctgtttgtaaggtctgcacgtggataatttgaccacttagaggccttcgttggaaacgggtttttttcatgtaaggctagacagaagaattcccagtaacttccttgtgttgtgtacattcaactcacagagttgaacgttcccttagacagagcagatttgaaacactctttttgtgcaattggcaaatggagatttcaagcgctttaaggtcaatggcaggaaaggaaatatcttcgtttcaaaactagacagaatcattcccacaaactgcgttgtgatgtgttcgttcaactcacagagtttaaactttcttttcatagagcagttaggaaccagtctgtttgtaaattctgtaagtggatattctgacatcttgtgaccttcgttggaaacgggatttcttcatattctgctagacagaagaattctcagtaacttcattgtgttgtgtgtattcaactcacagagttcaacgatgctttacacagagtagacttgaaacactcttgttgtggaatttgcaagtggagatttcagccgctttgaggtcaatggtagaataggaaatatcttcctatagaaactagacagaatgattctcagaaactcctttgtgatgtgtgcgttcaactcacacagtttaacctttgttttcatagagcagttaggaaacactctgtttgtaaagtctgcaagtggatattcagacctccttgaggcattcgttggaaacgggatttctacatattatgctagacagaagaattctcagtaacttccttgtgttgtgtgtattccactcacagagttgaacgatcctttacacagagcaggcttgtaacactctttttgtggaattttcaagtggagatttcagccgctttgaagtcaaaggtagaaaaggaaatatcctcctataaaaactagacagaatgattctcagaaactcctttgtgatgtgtgcgttcaactcacagagtttaacctttctgttcatagagcagttaggaaacactctgtttgtaaagtctgcaagtggatattcagacctctttgaggccttcgttggaaacgggatttcttcatattatgctagaccgaagaattcccagtaacttccttgtgttgtgtctgttcaactcacagagttgaactttcatttacacagagcagatttgaaacactctttttctggaatttgcaagtggagatttcaagcgctttgaggccaaaggcagaaaaggaaatatcttcgtataaaaactagacagaatcattctcagaaactgctctgcgatgtgtgcgttcaactctcagagtttaacttttcttttcattcagcagtttggaaacactctgtttgtaaagtctgcacgtggatattttgaccacttagaggccttcgttggaaacgggtttttttcctgtaagcctagacagaagaattctcagtaacttccttgtgttgtgtgtattcaactcacacagttgaacgatcctttacacagagcagacttgtaacactctttttgtggaatttgcaagtggagatttcagccgctttgaagtcaaatgtagaaaaggaaatatcttcctataaaaactagacagaatgattctcagaaacttctttgtgatgtgtgcgttcaactcacagagtttaacctttcttttcatagagcagttaggaaacactctgtttgtaaactctgcaagtggatatacagacctctttgaggccttcgttggaatcgggatttcttcatactatgctagacagaatatttctcagtaacttctttgtgtcgtgtgtatgcaactcacagagttcaaccttccttcagacagagcagatttgaaacactctttttgtggaatttgcaagtcgagatttcaagcgctttgaggccaaaggcagaaaaggaaatactttcgtataaaaactagacagaatcattctcagacactgctgcatgatgtgtgcgttcaactctcagagtttaacttttcttttcattcagcggtttggaaacactctgtttgtaaagtctgcacgtggatattttgaccacttagaggccttcgttggaaacgggtttttttcatgtaaggctagacagaaagaattcccagtaacttccttgtgttgtgtgcattcaactcacagagttgaacgttcccttagacagagcagatttgaaacactctatttgtgcaatttgcaagtgtagttttcaagctctttaaggtcaacggcagaaaaggaaatatcttcgtttcaaaactagacagaatcattcccacaaactgcgttgtgatgtgttcgttcatctcacagagtttaacttttctgttcatagagcagttaggaaacaccctgtttgtaaagtctgcaagtggatattcagacctccttgaggccttcgctggaaacgggatttcttcatattctgctagacagaagaattctcagtaaattccttgtgttgtgtgtattcaactcacagagttgaacgatcctttacacagagcagacttgaaacactctttttgtggaatttgcaagtggagatttcagccgctttgaggtcaatggtagaataggaaatatcttcctatagaaactagacacaatgattctcagaaactcctttgtgatgtgtgtgttcaactcacagagtttaacctttcttttcatagagcagttaggaaacactctgtttgtaatgtctgcaagtggatattcagacctctttgaggccttcgttggaaacgggttttttcatataaggctagacagaagaattctcagtaacttccttgtgttgtgtgtattcaactgacagagttgaactttcatttagagagagcagatttgaaacactgtttttgtggaatttgcaagtggagatttcaagtgctttggggccaaaggcagaaaaggaaatatcttcgtataaaaactagacagaatcattctcagaaactgctctgcgatgtgtgcgttcaactctcagagtttaacttttcttttcattcagcagtttggaaacactctgtttgtaaagtctgcacgtggatattttgaacatttagaggccttcgttggaaacgggtttttttcctgtaaggctagacagaataattctcagtaacttccttgtgttgtgtgtattcaactcacagagttgaacgatcctttacagagagcagacttgaaacactctttttgtggaatttgcaagtggagatttcagccgctatgaggtcaatggtagaaaaggaaatatcttcgtataaagactagacagaatgattctcctaaactccttcgtgatgtgtgcgttcaaatcacagagttgaacttttcttttcatagagcagttaggaaacactctgtttatatagtctgcaagtggatattcagacccctttgaggccttcgttggaaacgggatttcttaatattatgctagacagaagaattcccagtaacttccttgtgatgtgtgtgttcaactctgtgagttgaactttcatttacacagagcagatttgaaacactctttttgtggaatttgcaaatggagatttcaagcgctttgaggccaaaggcagaaaaggaaatatcttcgtataaaaactagacagaatgattctcagaaactcctttgtgatgtatgcgttcaactcacagagtttaacctttcttttcatagagcagttaggaaacactctgtttgtaaagtctgcaagtggatattcagacctccttgaggccttcgttgaaaacgggttttcttcatattatgctagacagaagaattctcagtaacttccttgtgttgtgtgtattcaactcacagagttcaatgatcctttacacagagcagacttgaaacactctttttgtggaatttgcaattggggatttcagccgctttgaggtcaatggtagaaaaggaaatatcttcgtataaaaactagacagaatgattctcagaaactcctttgtgatgtgtgcgttcaactcacagaatttaaccttccttttcatagagcagttgggaaacactctgtttgtaaagtctgcaagtggatattcagacctctttgaggccttcgttggaaacgggatttcttcatattctgctagacagaagaattctcagtaacttccttgtgttgtgtgtattcaactgacagagttgaactttcatttagacagagcagatttgaaacactctttttgtggaatttgcaagtggagatttcaagcgctttgaggccaaaggccgaaaaggaaatatcttcgtataaaaactagacagaatcattctcagaaactgctctgcgatgtgtgcgttcaactctcagagtttaacttttcttttcattcagcagtttggaaacactctgtttgtaaagtctgcacgtggatattttgaccacttagaggccttcgttggaaacgggttttttcctgtaaggctagacagaagaattctcagtaacttccttgtgttgtgtgtattcaactcacagagttgaacgatcctttacacagagcagacttgaaacactctttttgtggaatttgcaagtggagatttcagccgctttgaggtcaacggtagaataggaaatatcttcctaaagaaactagacagaatgattctcagaaactcctttgagctgtgtgcgttcaactcacagagtttaacctttcttttcatagagcagttaggaaacactctgtttgtaaagtctgcaagtggatattcagacatctttgaggctttcgttggaaacgggttttcttcatattctgctagacagaagaattctcagaaacttcctggtgttgtgtgttttcaactcacagagttcaacgatcctttacacagagtagacttgaaacactctttttgtggaattggcaagtggagatttcagccgctttgaggtcaagggtagaaaaggaaatatcttcgtacaaaaactagacagaatgattctcagcaaactcctttgtgatgtgtgcgttcaactcacagagttcaacctttcttttcatagagcagttgggaaacactctgtttgtaaagtctgcaagtggatattcagacttctttgaggccttcgttggaagcgggatttcttcatattctgctagacagaagaattcccagtaacttccttgtgttgtgtgtgttcaactcacagagttgaactttcatttacacagagcagattggaaacactctttttgtggaatttgcaagtggagatttcaagcgctttgaggccaaaggcagaaaaggaaatatcttcagtataaaaattagacagaatcattctcagaaaccgctctgtgatgtgtgcgttcaactctcagagtttaacttttcttttcattcagcagtttggaaacactctgtttgtaaagtctcctcgtggatattttgaccacttagaagccttcgttggaaacgtgttttttttcatgtaaggctagacagaagaattcccagtaacttccttttgttgtgtgcattcaactcacagagatgaacgttcccttagacagagcagatttgaaacactctatttgtgcaatttgcaagtgtagatttcaagcgctttaaggtcaatggcagaaaaggaaatatcttcgtttcaaaactagacagaattattcccacaaactgcgttgtgatgtgttcgttcaactcacagagttaaacctttcttttcatagagcagttaggaaacagtctgtttgaaaattctgtaagtggatattctgacatcttgtggccttcgttggaaacgggatttcttcatattctgctagacagaagaattctcagaatcttccctgtgttgtgtgtattcaactcacagagttgaacgatggtttacacagagcagatttgaaacactcatttggtggaatttgcaagtggagatttcagccgctttgaggtcaatggtagaaaaggaaatatcttcgtataacaactagacagaatgattctcagaaaatcttttgtgatgtgtgcgttcaactcacaaagtttaacttttcttctcatagagcagttaggaaacactctgtttgtaaagtctgcaagtgtatattcagacctactttgaggccttcgttggaaacgggatttcttcatattatgctagacagaagaattctcagtaacttccttgtgttgtgtgtattcaactcacagagttgaatgatcctttacacagagcagacctgaaacactctttttgtggaatttgcaagtggagatttcagctgctttgaggtcaatggtagaaaaggaaactatcttcgtataaagactagacagaatgattctcagaaactcctttgtgatgtgtgtgttcaactcacagagtttaacctttcttttcatagagcagttagtaaacactttgtttataaagtctgcaagtggatattcagacccctttgaggccttcgttggaaacgggatttcttcatattatgctagacagaagaattcccagtaacttccttgtgttgtgtgtgttcaactcacagagttgaactttcatttacacagagcagatttgaaacactctttttgtggaatttgcaaatggagatttcaagcgctttgaggccaaaggcagaaaaggaattatcttcgtataaaaactagacagaatcattctcagaaactgctgcgtgatgtgtgcattcaactctcagagtttaacttttcttttcattcagcggtttggaaacactctgtttgtaaagtctgcacgtggatattttgaccacttagaggccttcgttggaaacgggttttttttcatgtaaggctagacagaagaattcccagtaacttcctcgtgttgtgtgcattcaactcacagagttgaacgttcccttagacagagcagatttgaaacactctatttgtgcaattggcaagtgtagatttcaagcgctttaaggtcaatggcagaaaagggaatatcttcgtttcaaaactagacagaatcattcccacaaactgcgttgtgatgtgttcgttcaactcacagagcttaacctttcttttcatagagcacttaggaaacactctgtttgtaaattctgtaagtggatattctgaaatcttgtggccttcgttggaaacgggatttcttcatattctgctagacagaagaattctcagtaacttcccttgtgttgtgtgtattcaactcacagagttgaatgatcctttacacagagcagacttgaaacattctttttgtggaatttgcaagtggagatttcagccgctttgaggtcaatggtagaaaagtaaatatcttcgtataaagactagacagaatgattctcagaaactcctttgtgatgtgtgcgttcaactcacagagtttaacctttctgttcatagagctgttaggaaacactctgttcgtaaagtctgcaagtggatattcagacctccttgaggccttcgttggaaacgggatttcttcatattctgctagacagaagaattctcagtaacttccttgtgttgtgtttattcaactcacagagttgaatgatcctctacacagagcagacttgaaacactctttttgtggaatttgcaagtggagatttcagccgctttgaagtcaatggtagaaaagtaaatatcttcgtataaagactagacagaatgattctcagaaactcctttgtgatgtgtgagttcaactcacagagtttatcctttcttttcatagagcagttaggaagcactctgtttgtaaagtctgcaagtggatattcagacctctttcaggccttcgttggaaacgggatttcttcatattctgctagacagaagaattctcagtaacttccttgtgttgtgtgtattcaactcacagagttgaacgatcctttacacagagcagacttgaaacactctttctgtggaatttgcaagtggagatttcagccgctttgaggtcaatagtagaaaaggaaatatgcttcgtagaaaaactagacagaatgattctcagaaactcctttgtgatgtgtgcgttcaactcacagagtttaacctttcttttcatagagcagttgggaaacactctgtttgtaaagtctgcaagtggatattcagacatccttgaggcattcgttggaaacgggatttcttcatattctgctagaaagaagaattctcagtaacttccttgtgttgtgtgtattcaactcacagagttgaacgatcctttacacagagcagacttgaaacattctttttgtggaatttgcaagtggagatttcagccgctttggggtcaatggtagaataggaaatatcttcctatagaaactagacagaatgattctgagaaactcctttgtgatgtgtgcgttcaactcacagagtttaacctttcttttcatagagcagttgggaaacactccgtttgtaaactctgcaagtggatattcagacctcctttaggccttcgttggaaacgggatttcttcatattatgctagacagaagaattctcagtaacttccttgtgttgtgtgtattcaactgacagagttgaactttcatttagagagagcagatttgaaacactgtttttctggaatttgcaagtggagatttcaagcgctttggggccaaaggcagaaaaggaaatatcttcgtataaaaactagacagaatcattctcagaatctgctgcgtgatgtgtgcgttcaactctcagagtttaacttttcttttcattcagcggtttggaaacactctgtttgtaaagtctgcacgtggatattttgaccacttagaggccttcgttggaaacgggattttttcatgtaaggctagacagaagaattcccagtaacttccttgtgttgtgtgcattcaactcacagagttgaacgttcccttagacagagcagatttgaaacactctatttctgcaatttgcaagtgtagtttccaagctctttaaggtcaacggcagaaaaggaaatatcttcgtttcaaaactagacagaatcattcccacaaactgcgttgtgatgtgttcgttcaactcacagagtttaacctttctgttcatagagcagttaggaaacactctgtttgtaaagtctgtaagtggatattctgacatcttgtggccttcgttggaaacgggatttcttcatattctgctagatagaacaattctcagtaacttccttgtgttgtgtgtattcaacacacagagttgaacgatcctttacacagagcagacttgaaacactctttttgtggaatttgcaagtggagatttcagccgctttgaggtcaatggtagaataggaaatatcttcctatagaaactagacagaatgattctcagaaactcctttgtgatgtgtgcgttcatctcacagagtttaacctttcttttcatagagcagttgggaaacactctgtttgtaaagtctgcaagtggatattcagacatccttgaggctttcgttggaaacgggatttcttcatattctgctagaaagaataattctcagtaacttccttgtgttgtgtgtattcaactcacagagttgaaggatcctttacagagagcaggcttgaaacactctttttgtcgaatttgcaagtggagatttcagccgctttgaggtcaatggtagaataggtaatatcttcttatagaaactagacagaatgattctcatgaactcctttgtgatgtgtgcgttcaactcacagagtttaacctttcttttcatagagcagttaggaaacactctgtttgtaaagtctgcaagtggatattcagacctccttgaggccttcgttggaaacgggattacttcatattctgctagacagaagaattctcagtaacttccttgtgttgtgtgcattcaactcacagagttgaatgatcctttacacagagcagattagaaacactctttttgaggaatttgcaagtggagatttcagccgctttgaggtcaatggtagaaaaggaaatatcttcgtataaaaactagacagaatgattctcataaactcctttgtgatgtgcgcattcaactcacagagtttcacctttcttttcatagagcagttaggatacactctgtttgtaaagtctgcaagtggatattcagacctccttgaggccttcgttggaaacgggaattcttcatattctgctagacagaagaattctcagtaacttccctgtgttgtgtgtattcaactgacagagtcgaactttcatttagagagagcagatttgtaacactgtttttgtggaatttgcaagtggagatttcaagcgctttggggccaaaggtagaaaaggaaatatcttcgtataaaaactagacagaatcattctcagaaactgctctgcgatgtgtgcgttcaactctcagagtttaacttttcttttcattcagcagtttggaaacactctgtttgtaaagtctgcacgtggataacttgaccacttagaggacttcgttggaaacgggtttttttcctgtaaggctagacagaagaattcccagtaacttccttgtgttgtgtgcattcaactcactgagatgaacgttcccttagacagagcagatttgaaacactctatttgtgcaatttgcaagtgtagatttcaagcgctttaaggtcaatggcagaaaaggaaatatctttgtttcaaaactagacagaatcattcccacaaactgcgttgtgatgtgttcgttcaactcacagagtttaacctttctgttcatagagcagttaggaaacactctgtttgtaaagtctgtaagtggatattctgacatcttgtggccttcgttggaaacgggatttcttcatattctgcgagacagaataattctcagtaacttccttgtgttgtgtgtattcaactcacagagttgaacgatcctttacacagagcagacttgaaacactctttttgtggaatttgcaagtggagatttcagccgctttgaggtcaatggtagaataggaaatatcttcctatggaaactagacagaatgattctcagaaactcctttgtgatgtgtgtgttcaactcacagagtttaacctttcttttcatagaacagttagtaaacactctggttttaaagtctgcaagtggatattcagacccctttgaggccttcgttggaaacaggatttcttcatattctgctagacagaataattctcagtaacttccttgtgttgtgtgtattcaactaacagagttgaactttcatttggagagagcagatttgaaacactgtttttgtggaatttgcaagtggagatttcaagcgctttggggccaaaggcagaaaaggaaatatcttcgtataaaaactagacagaatcattctcagaaaatgctctgtgatgtgtgcgttgaactctcagagtttaacttttgttttcattcagcagtttggaaatactctgtttgtaaagtctgcacgtggatattttgaccacttagaggccttatttggaaacgggtttttttcatgtaagggtagacagaagaattcccagtaactttccttgtgttgtgtacattcaactcacagagttgaacgttcccttagacagagcagatttgaaacactctttttgtgcaattggcaagtggtgatttcagccgctttgaggtcaatggtagaaaaggaaatatcttcctataaaaactagacagaatcattcccacaaactgcgttgtgatgtgttcgttcaactcacagagtttaacctttcttttcatagagcagttaggaaacagtctgtttgtaaattctgtaagtggatattctgacatcttgtggccttcgttggaaacgggatttcttcatattctgctagagagaatacttctcagtaacttccttgtgttgtgtgtattcaactcacagagttgaaggatcctttacagagagcaggcttgaaacactctttttgtcgaatttgcaagtggagatttcagccgctttgtggtcaatggtagaataggaaatatcttcttatagaaactagacagaatgattctcagaaacttctttgtgatgtgtgcgttcaactcacagagtttaacctttcttttcatagagcagttaggaaacactctgtttgtaaactctgcaagtggatattcagacctgtttgaggccttcgttggaaacggtatttcttcatactatgctagacagaagaattctcagtaacttccttgtgttgtgtgtattcaactcacagagttgaacgatcctttacacagagcagacttgtaacactctttttgtggaatttgcaagtggagatttcagccgctttgaagtcaaaggtagaaaaggaaatatcttcctataaaaactagatagaatgattctgagaaactcctttgtgatgtctgcgttcaactcacagagttcaacctttcttttcatagagcagttaggaaacactctgtttgtaaagtctgcaagtggatattcagacttctttgaggctttcgttggaaacgggatttcttcatattctgctagacagaagaattcccagtaacttccttgtgttgtgtgtgttcaactcacagagttgaactttcattcacacagagcagatttgaaacactctttttgtggaatttgcaagtggagatttcaagcgctttgaggccaaaggcaaaaaaggaaatatcttcgtataaaaactagacagaatcattctcagaaactgctctgcgatgtgtgcgttcaactctcagagtttaacttttcttttcattcagcagtttggaaacactctgtttgtaaagtctgcacgtggatattttgaccacttaggggccttcgttggaaacgggtttctttcctgtaaggctagacagaagaattcccagtaacttccttgtgttgtgtacattcaactcacagagttgaacgttcccttagacagagcagatttgaaacactctttttgtgcaattggcaagtggagatttcaagcgctttgaggtcaatggcagaaaacgaaatatcttcgtttcaaaactagacagaatcattcccacaatctgcgttgtgatgtgttcgttcaactcacagagtttaacctttcttttcatagagcagttaggaaacagtctgtttgtcaattctgtaagtggatattctgacatcttgtggccttcgttggaaacgggatttcttcatattctgctagacagaagaattctcagaaacttccttgtgttgtgtgttttcaactcacagatttgaacgatgctttacacagagtagacttgaaacactctttttgtggaatttgcaagtggagatttcagccgctttgaggtcaatggtagaaaaggaaatatcttcgtttaaaaactagacagaatgattctcagaaactcatttgtgatgtgtgcgttcaactcacagagtttaacctttcttttcatagagcagttaggaaacactctgtttgtaatgtctgcaagtggatattcagacctctttgaggccttcgttggaaacgggatttcttcatattacgctagacagaaaaattctcagtaacttccttgtattctgtgtattcaactctcagagttgaatgatcctttacacagagcagacttgaaacactctttttgtggaatttgcaagtggagatttcagccgctttgtggtcaatggtagaataggaaatatcttcctatagaaactagacagaatgattctcagaaactcctttgtgatgtgtgcgttcaactcacagagtttaacctttctgttcatagagcagttaggaaacattccgtttgtaaagtctgcaagtggatattcagacctctttgaggccttcgttggaaacgggatttcttcatattatgctagacagaagaattctcagcaacttccttgtgttgtgtgtattcaactcacagagttgaacgatcctttacacagagcagacttgaaacactctttttgtggaatttgcaagtggagatttcagccgctttcaggtcaatagtagaaaaggaaatatcttcgtagaaaaactagacagaatcattctcagaaactccttcgtgatgtgtgccgttcaactcacagagtttaacctttcttttcatagagcagttaggaaacactctgtttataaagtctgcaagtggatattcagacctctttgaggccttcgttggaaacaggatttcttcatatgatgctagacagaagaattctcagtgacttccttgtgttgtgtgtattcaactcacagagttgaacgatcctttacacagagcagacttgaaacactctttttgtggaatttgcaagtggagatttcagccgctatgtggtcaatggtagaataggaaatatcttcctatagaaactagacagaatgattctcagaaactcctttgtgatgtgtgccttcaactcacagagtttaacctttcttttcatagagcagttaggaaacactctgtaaagtctgcaagtggatattcagacctctttgaggccttcgttggaaacgggatttcttcatattctgctagacagaagaattctcagtaacttccttgtgttgtgtgtattcaactcacagagttgaacgatcctttacacagagcagacttgaaacactctttttgtggaaattgcaagtggagatttcagccgctttgaggtcaatggtagaaaaggaaatatcttcgtataaaaactggagagaatgattctcagaaactcctttgtgatgtgtgcgttcaactcacagagtttaacctttcttttcgtagagcagttaggaaacactctgtttgtaaagtctgcaagtggatattcagacctccttgaggccttcgttggaaacgggatttcttcatattctgctctacagaagaattctcagtaacttccttgtgttgtgtgtattcaactcacagagttgaacgatcctttacacagtgcagacttgaaacactctttttgtggaatttgcaagtggagatttcagccgctgtgagttcaatggtagaataggaaatatcttcctatagaaactagacagaatgattctcagaaactcctttgagatgtgtgtgttcaactcacagagtttaacctttcttttcatagagcagttaggaatcactctgtttgtaaagtctgcaagtggatattgagacctctttgaggccttcgttggaaacgggattttttcatataaggctagacagaataattctcagtaacttccttgtgttgtgtgtattcaactcacagagttgaacgatcctttacacagagcagacttgaaacactctttgtgtggaatttgcaagtggagatttcagccgctttgaggtcaatggtagaataggaaatatcttcctatagaaactagacagaatgattctcagaaactcctttgtgatgtgtgcgttcaactcacagagtttaactttccttttcatagagcagttaggaaacactctgtttgtaatgtctgcaagtggatattcagacccctttgaggccttcgttggaaacgggatttcttcatattatgctagacagaataattctcagtaacttccttgttttgtgtgtattcaactcacagagttgaacgatcctttacagagagcagacttgaaacactctttttgtggaatttgcaagtggagatttcaggcgctttgaggtcaatggtagaataggaaatatcttcctatagaaactagacagaatgattctgagaaactcctttgtgatgtgtgcgttcaactcacacagtttaacctttcttatcatagagcagttaggaaacactctgtttgtaaagtctgcaagtggatattcagacctccttgaggccttcgttggaaacgggatttcttcatattatgctagacataagaattctcagtaactgccttgtgttgtgtgtattcaactcacagagttgaacgatcctttacacagggcagacttgaaacactctttttgtggaacttgcaagtggagatttcagccgctttgaggtcaatggtagaataggaaatatcttcctatagaaactagacagaatgattctcagaaactcctttgtgatgtgtgcgttcaactcgcagagttcaacctttcttttcatagagcagttgggaaacactctgtttgtaaagtctgcaagtggatattcagacatccttgaggctttcgttggaaacgggttttcttcatattctgctagaaagaagaattctcagtaacttccttgtgttgtgtgtattcaactcacagagttcaacgatcctttacacagagcagacttgaaacactctttttggggaatttgcaagtggagatttcagccgctttgaggtcaatggttgaaaaggagatatcttcgtataaaaactagacagaatgattctcagaaactcctttgtgatgtgtgcgttcaactcacagagtataacctttcttttcttagagcagttaggaaacactctgtttgtaaagtctgcaagtggatattcagacctccttgaggccttcgttggaaacgggtttttttcatataaggctagacagaagaattctcagtaacttccttgtgttgtgtgtattcaactcacagagttgaacgatcctttacacagagcagacttgaaactctctttttgtggaatttgcaagtggagatttcagccgctttgagttcaatgttagaataggaaatatcttcctatagaaactagacagaatgattctcaaaaactcctttgtgatgtgtgcgttcaactcacagagttcaacctttcttttcctagagcagttgggaaacactctgtttgtaaagtctgcaagtggatattcagacttctttgaggccttcgttggaagcgggatttcttcatattctgctagacagaagaattctcagtaacttccttgtgttgtgtgtattcaactgacagagttgaactttcatttggagagagcagatttgaaacactgtttttgtggaatttgcaagtggagatttcaagcgctttggggccaaaggcagaaaaggatatatcttcgtagaaaaactagacagaatcattctcagaaactgctctgcaatgtgtgcgttcaactctcagagtttaactttgcttttcattcagcagtttggaaacactctgtttgtaaagtctgcacgtggatattttgaccacttagaggccttcgttggaaacgggtttctttcctgtaaggctagacagaagaattcccagtaacttccttgtgttgtgtgcattcaactcacagagttgaacgttgccttagacagagcagatttgaaacactctatttgtgcaatttgcaagtgtagatttcaagcgctttaaggtcaatggcagaaaaggaaatatcttcgtttcaaaactagacagaatgattctcagaaacttcattgtgatgtgtgcgttcaactcacagagttaaacctttcttttcatagagcagttgggaaacagtctgtttgtaaattctgtaagtggatattctgacatcttgtggccttcgttggaaacaggatttcttcatattctgctagacagaagaattctcagaaacttccttgtgttgtgtgtattcaactcacagagttgaacgatcgtttacacagagcagacttgagacactctttttgtggaatttgtaagtggagatttcagccgctttgaggtcattggtagaaaaggaaatatcttcatataaaaactagacagaatgattctcataaactcctttgtgatgtgtgcgttcaactcacagcagtttaacttttcttttcatagagcagttaggaaaaactctgtttgtaaagtctgcaagtggatattcagacctctttgaggccttcgttggaaacgggatttcttcatattatgctagacagaagaattctcagtaacttccttgtgttgtgtgtattcaactcacagagttgaacgatcctttacacagagcagacttgaaacactctttttgtggaatttgcaagtggagatttcagccgctttgagttcaattgtagaataggaaatatcttcctatagaaactagacagaatgattctcagaaactcctttgtgatgtgtgcgttcaactcacagagtttaacctttcttttcatagagcagttaggaaacactctgtttgtaaagtctgcaagtggatattcagtcttctttgaggctttcgttggaaacgggatttcttcatattctgctatacagaagaattctcagtaacttccttgtgttgtgtgcattcaactcagagagttgaacgatcttttacacagagcagattggacacactcttgttgtggaattgcaagtggagatttcagcccctttgaggtcaatggtagaaaaggaaatatctttgtataaaaacaagacagaatgattctcagaaactcctttgtgatgtgtgcgttcaagtcacagagtttaacctttcttttcatagagcagttaggaaacactctgtttctaaagtctgcaagtggatattcagacctctttgaggccttcgttggaaacgggatttcttcatattctgctagacagaagaattctcagtaacttccttgtgttgtgtgtattcaactcacagagttgaacgatcctttatacagagcagacttgtaacactctttttgtggaatttgcaagtggagatttcagccgctttgaagtcaaaggtagaaaaggaaatatcttcctataaaaactagacagaatgattctcagaaaatcttttgtgatgtgtgcgtttaactcacagagtttaacttttcttctcatagagcagttaggaaacactctgtttgtaaagtctgcaagtggatattcagacctctttgaggccttcgttggaaacgggatttcttcatattatgctagacagaagaattctcagtaacttccttgtgttgtgtgtattcaactgacagagttgaactttcatttagacagagcagatttgaaacactcttcttgtggaatttgcaaatggagatttcaagcgctttgaggccaaaagcagaaaaggaaatatcttcgtataaaaactagacagaatcattctcagaaactgctctgcgatgtgtgcgttcaactctcagagtttaacttttcttttcattcagcagtttggaaacactctgtttgtaaagtctgcacgtgtttattttgaccacttagaggccttcgttggaaacgggtttttttcctgtaaggctagacagaagaattcccagtaacttccttgtgttgtgtgcattcaactcacagaggtgaacgttcccttagacagagcagatttgaaacactctatttgtgcaatttgcaagtgtagatttcaagcgctttaaggtcaatggcagaaaaggaaatatcttcgtttcaaaactagacagaatcattcccacaaactgcgttgggatgtgctcgttcaactcacagagtttaaactttctgttcatagagcagttaggaaacactctgtttgtaaagtctgtaagtggatattctgacatcttgtggcctttgttggaaacgggatttcttcatattctgctagacagaagaattctcagtaacttccttgtgttgtgtgttttcaactcacagagttgcacgatcctttacacagagcagacttgaaacactccttttgtggaatttgcaagtggagatttcagccgctttgaggtcaatggtagaataggaaatatcttcctatagaaagtagacagaatgattctcagaaactcctttgtgatgtgtgcgttcaactcacagagtttaacttttcttttcatagagcagttaggaaacactctgtttgtaaagtctgcaagtggatattcagacctctttgaggccttcgttggaaacgggatttcttcatattatgctagaccgaagaattgccagtaacttccttgtgttgtgtgtgttcaactcacagagttgaactttcatttacacagagcagatttgaaacactctttttgtggaatttgcaaatggagatttcaagcactttgaggccaaaggcagaaaaggaaatgtcttcgtttcaaaactagacagaatcattcccagaaactgctctgcgatgtgtgcgttcaactctcagagtttaacttttcttttcattcagcagtttggaaacactctgtttgtaaagtctgcacgtggataatttgaccacttagaggccttcgttggaaacgggtttttttcatgtaaggctagacagaagaattctcagtaacttccttctgttgtgtgtattcaactcacagagttgaacgatcctttacacagagcagacttgtaacactctttttgtggaatttgcaagtggagatttcagccgctttgaagtcaaaggtagaaaaggaaatatcttcctataaaaactagacagaatgattctcagaaactcctttgtgatgtgtgctttcaactcacagagtttaacgtttcttttcatagagcagttaggaaacactctgtttgtaaagtctccaagtggatattcagacctctttgaggccttcgttggaaacgggtttttttcatataaggctagacagaagaattctcagtaacttccttgtgttgcgtgtattcaactgacagagttgaactctcatttagatagagcagattttaaacactgtttttgtggaatttgcaagtgtatatttcaaccgctttggggccaaatgcagaaaaggaaatatcttcgtataaaaactagacagaatgattctcagaaactcctttgtgatgtgtgcgttcaactcacagagtttatcctttcttttcatagagcagttaggaaacactctgtttgtaaagtctgcaagtggatattcagacatctttgaggctttcgttggaaacgggatttcttcatattctgctagacagaagaattctcagaaacttcgttgtgttgtgtgtggtcaactcacagagttcaacgatcctttacacagagtagacttgaaacactctttttgtggaattggcagggtggagatttcagccgctttgaggtcaattttagaaaaggaaatatcttcgtataaaaactagacagaatgattctcagaaactcctttttgctgtgtgcgttcagctcacagagtttaacctttcttttcatagagcagttaggaaacactctgtttgtaaagtctgcaagtggatattcagacctccttgaggccttcgttggaaacgggatttcttcatattctgctatagagaagaattcccagtaacttccttgtgttgtgtgtgttcaactcacagagttgaactttcatttacacagagcagatttgaaacactctttttgtggaatttgcaagtggagatttcaagcactttgaggccaaaggcagaaaaggaaatatcttcgtttcaaaactagacagaatcattctcagaaactgctctgcgatgtgtgctttcaactctcagagtttaacttttcttttcattcagcagtttgaaaacactctgtttgtaaagtctgcacgtggataacttgaccacttagaggccttcgttggaaacgggtttttttcatgtaaggctagacagaagaattcccagtaacttccttgtgttgtgtacattcaactcacagagttgaacgttcccttagacagagcagatttgaaacactctttttgtgcaattggcaagtggagatttcaagcgctttaaggtcaatggcagaaacggaaatatcttcgtttcaaaactagacagaatcattcccacaaactgcgttgtgatgtgttcgttcaactcacagagtttaacctttcttttcatagaacagttaggaaacagtctgtttgtaaattctgtaagtggatattctgacatcttgtggccttcgttggaaacgggatttcttcatattctgctagacagaagaattctcagtaacttccttgtgttgtgtgtattcaactcacagagttgaacgatcgtttacacagagcagacttgagacactctttttgtggaatttgtaagtggagatttcagccgctttgaggtcaacggtagaaaaggaaatatcttcatataaaaactagacagaatgattctcagaaacttctttgtgatgtgtgcgttcaactcacagagtttaacctttcttttcatagagcagttaggaaacactctgtttgtaaactctgcaagtggatattcagacctgtttgaggccttcgttggaaacgggatttcttcatattatgctagacagaagaattatcagaaacttccttgtgttgtgtgtattcaactcaaagagttgaacgatcctttacacagtgcagacttgaaacactctttttgtggaatttgcaagtggagatttcagccgctttgaggtcaatggtagaataggaaatatcttcctataggaactagacagaacgattctcagaaactcctttgtgatgtgtgcgttcaactcacagagtttaacctttcttttcatagagcagttaggaaacactctgtttgtaaagtctgcaagtggatattcagacctgtttgaggccttcgttggaaacgggatttcttcatattctgctagacagaagaattcccagtaacttccttgtgttgtgtgtgttcaactcacagagttgaactttcatttacaaagagcagatttgaaacactctttttgtggaatttgcaggtggagatttcaagcgctttgaggccaaaggcagaaaaggaaatatcttcgtataaaaactagacagaatcattctcagaaactgctctgcgatgtgtgcgttcaactctcagagtttaacttttcgtttcattcagcagtttggaaacactctgtttgtaaagtctgcacgtggatattttgaccacttagaggccttcgttggaaacgggtttttttcatgtaaggctagacagaagaattctcagtaacttccttgtgttgtgtgtattcaactcacagatttgaacgatcctttacacagagcagacttaaaacactctttttgtggaatttgcaagtggagatttcagccgctttgaggtcaatgttagaaaaggaaactatcttcgtataaaaactagacagaatgattctcataaactcctttgtgatgtgtgcgttcaactcacagagtttaacttttcttttcatagagcagttaggaaacactctgtttgtaaagtctgcaagtggatattcagacctgtttgaggccttcgttggaaacgggatttcttcatattctgctagacagaagatttcccagtaacttccttgtgttgtgtgtgttcaactcacagagttgaactttcatttacacagagcagatttgaatcactctttttgtggaatttgcaaatggagatttcaagcgctttgaggccaaaggcagaaaaggaaatatcttcgtataaaaactagacagaatcattctcagaaaccgctctgtgatgtgtgcgttcaactctcagagtttaacttttcttttcattcagcagtttggaaacactctgtttgtaaagtctgcacgtggatattttgaccacttagaagccttcgttggagacaggtttttttcatgtaaggctagacagaagaattctcagtaacttccttgtgttgtgtgtattaaactcacagagttgaacgatcctttacacagagcagacttgaaacactctttttgtggaatttgcaagtggagatttcagccgctttgaggtcaatggtagaataggaaatatcttcctatagaaaatagacacaatgattctcagaaactcctttgtgatgtgtgcgttcaactcacacagtttaacctttcttttcatagagcagttaggaaacactctgtttgtaaagtctgcaagtggatattcagacctccttgtggccttcgttggaaacgggatttcttcctattatgctagacagaagaattctcagtaacttccttgtgttgtgtgtattcaactcacagagttgaacgatcctttacacagagcagacttgaaacactctttttgtggaatttgcatgtggagatttcagccgctttgagttcaatggtagaataggaaatatcttcttatagaaactagacagaatgattctcagaaactgctttgtgatgtgtgtgttcaacacacaaggtttaacctttcttttcatagagcagttaggaaacactctgtttgtaaagtctgcaactggatattcagacatccttgaggctttcgttggaaacgggatttcttcatattctgctagaaagaagaattctcagtaacttccttgtgttgtgtgtattcaactcacagagttgaacgatcctttacacagagcagacttgaaacactctttttgtggatatttgcaagtggagatttcagccgctttgaggtcaatgttagaaaaggaaatatcttcgtataaaaactagacagaatgattctgagaaactcctttgtgatgtgtgcgttcaactcacagagtttaacctttcttttcatagagcagttaggaaacactctgtttgtaaagtctgcaagtggatattcagacctccttgaggccttcgttggaaactgcatttcttcatattctgctatacagaagaattctcagtaacttccttgtgttgtgtgtattcaactcacagatttgaacgatcctttacacagagcagacttgaaacactctttttgtggaatttgcaagtggagatttcagcctctttgtggtcaatggtagaataggaaatatattcctatagaaactagacagaatcattctcagaaactgctgcgtgatgtgtgcgttcaactctcagagtttaacttttcttttcattcagcggtttggaaacactctgtttgtaaagtctgcacgtggaacttttgaccacttagaggccttcgttggaaacgggtttttttcatgtaaggctagacagaagaattcccagtaacttccttgtgttgtgtgcattcaactcacagagttgaacgttcccttagacagagcagatttgaaacactctatttgtgcaatttgcaagtgtagttttcaagctcttttaggtcaacggcagaaaaggaaatatcttggtttcaaaactagacagaatcattcccacaaactgcgttgtgatgtgttcgttcaactcacagagtttaacctttctgttcatagagcagttaggaaacactctgtttgtaaagtctgtaagtggatattctgacatcttgtggccttcgttgggaacgggatttcttcatattctgctagacagaagaattctcagtaacttccttgtgttgtgtgtattcaactcacagagttgaacgatcctttacacagagcagacttgaaacattctttttgtggaatttgcaagtggagatttcagccgctttgaggtcaatggtggaataagaaatatcttcctatagaaactagacagaatgattctcagaaactcctttgtgatgtgtgcgttcaactcacagagtttaacctttgttttcatagagcagttaggaaacactctgtttgtaaagtctgcaggtggatattcagacatctttgaggctttcgttggaaacgggatttcttcatattctgctatacagaagaattcccagtaacttctttgtgttgtgtgtgttcaactcacagagatgaactctcatttacacagagcagatttgaaactctctttttgtggaatttgcaaatggagatttcaagcgctttgaggccaaaggcagaaaaggaaatatcttcgtataaaaactaggcagaatcattctcagaaactgctctgcgatgtgtgcgttcaactctcagagtttaacttttcttttcattcagcagtttggaaacactctgtttgtaaagtctgcacttggataatttgaccacttagaggcctttgttggaaacgggtttttttcatgtaaggctagacagaagaattctcagaaacttcgttgtgttgtgtgttttcaactcacagagttgaacgatcctttacacagcgtagacttgaaacactctttttgtggaatttgcaagtggagatttcatccgctttgaggtcaatggtagaaaaggaaatatcttcgtataaaaactagacagaatgattctcagaaactcctttgtgatgtgtgcgttgaactcacagagtttaacctttcttttcatagagcagttaggaaacactctgtttgtaaagtctgcaagtggatattcagacctctttgaggccttcgttggaaacggttttttttcatataaggctagacagaagaattctcagtaacttccttgtgttttgtgtattcaactgacagagttgaactttcatttagagagagcagatttgaaacactgtttttgtggaatttgcaattggagatttcaagcgctttggggccaaaggcagaaaaggaaatatcttcgtataaaaactagacagaatcattctcagaaactgctctgcgatgtgtgcgttcaactctcagagtttaacttttcttttcattcagcagtttggaaacactctgtaaagtctgcacgtggatattttgaccatttagaggctttcgttggaaacgggtttttttttgtaaggctagacagaagaattcccaggaacttccttgtgttgcgtacattcaactcacacatttgaacgttcccttagacagagtagatttgaaatactctttttctgcaattggcaagtggtgatttcagccgctttgaggtcaatggtagaaaaggaaatatcttcgtataaaaactagacagaatcattcccacaaactgcgttgtgatgtgttcgttcaactcacagagtttaacctttctgttcatagagcagttaggaaacactctgtttgtaaagtctgaaagtggatattctgacatcttgtggccttcgatggaaacgggatttcttcatattctgctagacagaagaattctcagaaacttccttgtgttgtgtgtattcaactcacagagatgaacgatcctttacacagagcagacttgaaacactctttttgtggaatttgcaagtggagatttcagccgctttgaggtccatggtagaaaaggaaatatcttcgtataaaaactagacagaatgattctcagaaactcctttgtgatgtgtgcgttcaactcacagagttcaacctttcttttcatagagcagttaggagacactctgtttgtaaagtctgcaagtggatattcagacctctttgaggccttcgttggaaacgggttttcttcatattctgctagagagaagaattcccagtaacttccttgtgttgtgtacattcaactcacagagttgaacgttcccttagacagagcagacttgtaacactctttttgtggaatttgcaagtggagatttcagcagctttgaagtcaaaggtagaaaaggaaatatcttcctataaaaacttgacagaatgattctcagaaactcctttgtgatgtgtgcgttcaactcacagagtttaacctttcttttcatagagcagttaggaaacactctatttgtaaattctgcaagtggatattcagacctccttaaggccttcgttggaaacgggatttcttcatattatgctagacagaagaattcccagtaacttccttgtgttgtgtgtgttcaactcacagagttgaactttcatttacacagagcagatttgaaacactctttttgtggaatttgaaatggagatttcaagcgctttgaggccaaaggcagaaaaggaaatatcttcgtataaaaacgagacagaatcattctcagaaactgctctgcgatgtgtgcgttcaactctcagagtttaacttttcttttcattcagaagtttggaaacactctgtttgtaaagtctgcacgtggataacttgaccacttagaggccttcgttggaaacgggtttttttcatgtaagtctagacagaagaattcccagtaacttccttgtgttgtgtacattcaactcacagagttgaacgttcccttagacaaagcagatttgaaacactctttttgtgcaattggcaaatggagatttcaagcgctttaaggtcaatggcagaaaaggaaatatcttcgtttcaaaactagacagaatcattcccacaaactgcgttgtgatgtgttcattcaactcacagagtttaacctttccgttcatagagcagttaggaaacacactgtttgtaaagtctgtaagtggatattctgacatcttgtggccttcgttggaaacgggatttcttcatattctgctagacagaagaattctgagaatcttccttgtgttgtgtgtattcaactcacagagttgaacgatcctttacacagagcagacttgaaacactctttttgtggaatttgcaagtggagatttcagccgctttgaggtccatggtagaaaaggaaatatcttcgtataaaaactagacagaatgattctcagaaaatcctttgtgatgtgtgcgttcaactcacagagtttaacttttctgttcatagagcagttaggaaacactctgtttgtaaagtctgcaagtggatattcagacctctttgaggccttcgttggaaacgttatttcttcatattatgctagacagaagaattctcagtaacttcccttgtgttgtgtgtattcaactcacagagttgaacggtcctttacacagagcagacttgaaacactctttttgttgaatttgcaagtggagatttcagccgctttgaggtcaatggtagaataggaaatatcttcctatagaaactagacagaatgattctcagaaactcctttgtgatgtgtgtgttcaactcacagagtttaacctttcttttcatagaacagttagggaacactctgtttgtaaagtctgcaagtggatattcagacctctttgaggccttcgttggaaacacgtttttttaatctaaggctagacagaagaattcccagtaacttccttgtgttgtgtgtgttcaactcacagagttgaactttcatttacacagagcagatttgaaacactctttttgtggaatttgcagatggagatttcaagcgctttgaggccaaaggcagaaaaggaaatatcttcgtataaaaactagacagaatcattctcagaaactgctctgtgatgtgtgcgttcaactctcagagtttaacttttcttttcattcagcagtttggaaacactctgtttgtaaagtctgcacgtggataatttgaccacttagaggccttcgttggaaacgggtttttttcatgtaaggctagacagaataattctcagtaacttccttttgttgtgggtattcaactcagagttgtacgatcctttacagagagcagacttgaaacactctttttgtggaatttgcaagtggagatttcagccgctttgaggtcaatggtagaataggaaatatcttcctatagaaactagacagaatgattctcagaaactcctttgtgatgtgtgcgttcaactcacagagtttaacctttcttttcgtagagcagttaggaaacactctgtttgtaaagtctgcaagtggatattcagacctccttgaggccttcgttggaaatgggatttcttcatattctgctagacagaagaattctcactaacttccttgtgttgtgtgtattcaactcacagagttgaacgatcctttacacagagcagacttgaaacactctttttgtggaatttgcaagtggagatttcagccgctttgaggtcaacggtagaaaaggaaatatctccgtataaagactagacagaatcattctcagaaactgctctgcgatgtgtgcgttcaactctcagagtttaacttttcttttcattcagcagtttggaaacactctgtttgtaaagtctgcacgtggatattttgaccatttagaggccttcgttggaaacgggtttttttcatgtaaggctagacagaagaattcccagtaacttccttgtgttgtgtacattcaactcacagagttgaacgttcccttagacagagcagatttgaaacactctttttgtgcaattggcaagtggtgatttcagccgctttgaggtcaatggtagaaaaggaaatatcttcctataaaaactagacagaatcattcccacaaactgcgttgtgatgtgttcgttcaactcacagagtttaacctttctgttcatagagcagttaggaaacactctgtttgtaaagtctgcaagtggatattcagacctccttgaggccttcgttggaaacgggatttcttcatattactgctagacagaataattctcagtaacttccttgtgttgtgtgtattcaactcacagagttgaaggatcctttacagagagcaggcttgaaacactctttttgtcgaatttgcaagtggagatttcagccgctttgtggtcaatggtagaaaagtaaatatcttcctataaagactagacagaatgattctcagaaactcctttgtgatgtgtgcgttcaactcacagagtttaacctttcttttcatagagcagttaggaaacactctgtttgtaaagtctgcaagtggatattcagacaactttgaggccttcgttggaaacgggatttcttcatgttctgctagacagaagaattcccagtaactttccttgtgttgtgtgtgttcaactcacagagttgaactctcatttacacagagcagatttgaaacactctttttgtggaatttgcaagtggagatttcaagcgctttgaggccaaaggcagaaaaggaaatatcttcgtataaaaactagacagaatcattctcagaaactgttgcgtgatgtgtgcgttcaactctcagagtttaacttttcttttcattcagcggtttggaaacactctgtttgtaaagtctgcacgtggatattttgaccacttagaggccttcgttggaaacgggttttttttcatgtaaggctagacagaagaattcccagtaacttccttgtgttgtgtgcattcaactcacagagttgaacgttcccttagacagaccagatttgaaacactctatttgtgcaatttgcaagtgtagatttcaagcgctttgaggtcaatggcagaaaaggaaatatcttcgtttcaaaactagacagacaatcattctcacaaactacgttgtgatgtgttcgttcaactcacagagtttaaactttctgttcatagagcagttaggaaacattctgtttgtaaagtctgtaagtggatattctgacatcttgtggccttcgttggaaacgggatttcttcatattctgctagacagaagaattctcagtaacttccttgtgttgtgtgtattcaactcacagagttgaacgatcctttacacagagcagacttgaaacactctttttgtggaatttgcaagtggagatttctgccgctttgaggtcaatggtagaataggaaatatcttcgtataaaaactagacagaatgattctcagaaactcctttgtgctgtgtgtgttcaactcacagagtttaacctttcttttcatagagcagttaggaaacactctgtttgtaaagtctgcaagtggatattcagacctctttgaggccttcgttggaaacgggtttttttcatataaggctagacagaagaattctcagtaacttccttgtgttgtgtgtattcaactgacagagttgaactttcctttagagagagcagatttgaaacactgtttttgtggaatttgcaagtggagatttcaagcgctttggggccaaaggcagaaaaggaaatatcttcgtataaaaactagacagaatcattctcagaaactgctctgcgatgtgtgcgttcaactctcagagtttaacttttcttttcattcagcagtttggaaacactctgtttgtaaagtctgcacgtggatatttgaccacttagaggccttcgttggaaacgggtttttttcctgtaaggctagacagaataaatcccagtaacttccttgtgttgtgtgcattcaactcacagagttgaacgttcccttagacagagcagatttgaaacattctatttgtgtaatttgcaagtgtagatttcaagcgctttaaggtcaatggcagaaaaggaaatatcttcgtttcaaaactagacagaatcattcccacaaactgcgttgtgatgtgttcgttcaactcacagagtttaacctttctgttcatagagcagttaggaaacactctgtttgtaaagtctgtaagtggatattctgacatcttgtggccttcgttttaaacgggatttcttcatattctgctagacagaagaattctcagtaacttctttgtgttgtgtgtattcaactcacagagttgaacgatcctttacacagagcagactggaaacactctttttgtggaatttgcaagtggagatttcagccgctttgaggtcaatgttagaataggaaatatcttcctatagaaactagagagaatgattctcataaactcctttgtgatgtgtgcgttcaactcacagagtttaacctttcttttcatagagcagttaggaaacactctgtttgtaaattctgcaagtggatattcagacctccttgaggccttcgttggaaacgggatttcttcatattctgctagacagaaaaattctcagtaacttccttgtgttgtgtgtattcaactcacagagttgaacgatcctttacacagagcagacttgaaacgctctttttgtggaatttgcaagtggagatttcagccgcgttgaggtcaatggtagaaaaggaaatatcttcgtataaaaactagacagaatgattctcaaaaactcctttgtgatgtgtgcgttcaactcacagagtttaacctttctgttcatagagcagttaggaaacactctgtttgtaaagtctgcaagtggatattcagacctccttgaggccttctttggaaacgggatttcttcatattctgatagacagaagaattctcagtaacttccttgtgttgtgtgtattcaactcaaagagttgaacgatcctttacacagagcagacttgaaacacactttttgtggaatttgcaagtggagatttcagccgctttgaggtcaaaggtagaaaaggaaactatgttcgtataaagagtagacagaatgattctgagaaactcctttgtgatgtggcgttcaactcacagagtttaacctttcttttcatagagcagttaggaaacactctgtttgtaacgtctgcaagtggatattcagacctccttgaggccttcgttggaaacgggttttcttcatattatgctagacagaagaattctcattaacttccttgtgttgtgtgtattcaactcacagagttgaacgatcctttacacagagcagacttgaaacactctttttgtggaatttgcaagtggagatttcagccgctttgagttcaatggtagaataagaaatatcttcctatagaaactatacagaatgattctcagaaactcctttgtgatgtgtgcattcaactcacagagtttaacctttcttttaatagagcagttaggaaacactctgtttgtaaagtctgcaagtggatattcagacctccttgaggccttcgttggaaacgggatttcttcatattatgctagacagaagaattctcagtaacttccttgtgttgtgtgtattcaactgacagagttgaactttcatgtagagagagcagatttgaaacactgtttttgtggaatttgcaagtggagatttcaagcgctttggggccaaacgcagaaaaggaaatatcttcgtataaaactagacagaatcattctcagaaactgctctgcgatgtgtgcgttcaactctcagagtttaacttttcttttcattcagcagtttggaaacactctgtttgtaaagtctgcacgtggatattttgaccacttagaggccttcgttggaaacgggtttttttcctgtaaggctagaaagaagaattcccagtaacttcccttgtgttgtgtacattcaactcacagagttgaacgttaccttagacagagcagatttgaaacactctttttgtgcaattggcaaatggagatttcaagcgctttaaggtcaatggcagaaaaggaaatatcgtcgtttcaaaactagacagaatcattcccacaaactgcgttgtgatgtgttcgttcaactcacagagtttaacctttcttttcatagagcagttaggaaacagtctgtttgtcaattctgtaagtggatattctgacatcttgtggccttcgttggaaacgggatttcttcatattctcctagacggaagaattctcagtaacttccttgtgttttgtgtattcaactcacagagttgaatgatcctttacgcagaacagacttgaaacactctttttgtggaatttgcaagtggagatttcagccgctttgaggtcaatggtagaaaaggaaatatattcgtataaaaactagacagaatgattctcagaaacttctttgtgatgtgtgcgctcaactcacagagtttaacctttcttttcatagagcagttagggaacactctgtttgtaaagtctgcaagtggatattcagacctctttgaagccttcgttggaaacgggatttcttcatattatgctagacagaagaattctcagtaacttccttgtgttgtgtgtattcaactcacagagttcaacgatccgttacacagagcagacttgaaacactctttttgtggaatttgcaagtggagatttctgccgctttgaggtcaatggtagacaaggaaatatcttcgtataaaaactagacagaatcattctcagaaactgctctgcgatgtgtgcgttcaactctcagagtttaacttttcttttcattcagcagtttggaaacactctgtttgtaaagtctgcacgtggatattttgaccacttagaggccttcgttggaaacgggtttttttcctgtaaggctagacggtagaattcccagtaactttccttgtgttgtgtacattcaactcacagagttgaacgtttccttagagagagcagatttgaaacactctttttgtgcaattggcaagtggtgatttcagccgctttgaggtcaatggtagaaaaggaaatatcttcgtataaaaactagacagaatcattcccacaaactgcgttgtgatgtgttcgttcaactcacagagtttaacctctccgttcatagagcagttaggaaacacactgtttgtaaagtctgtaagtggatattctgacatcttgtggccttcgttggaaacgggatttcttcatattctgctagacagaagaattctcagaatcttccttctgttgtgtgtattcaactcacagagttgaacgatcctttacacagagcagacttgaaacactctttttgtggaatttgcaagtggagatttcagccgctttgaggtccatggtagaaaaggaaatatcttcgtataaaaactagacagaatgattctcagaaaatcttttgtgatgtgtgcgttcaactcacagagtttaacttttcttctcgtagagcagttaggaaacactctgtttgtaaagtctgcaagtggatattcagacctctttgaggtcttcgttggaaacgggatttcttcatattatgctagacagaagaattctcagtaacttccttgtgttgtgtgtattcaactcacagagttgaacgaccctttacacagagcagacttgtaacactctttttgtggaatttgcaagtggagatttcagccgctttcaagtcaaaggtagaaaaggaaatatcttcctataaaaactagacagaacgattctcagaaactcctttgtgatgtgtgcgttcaactcacagagtttaacttttcttttcatagagccattaggaaacactctgtttgtaaagtctgcatgtggatattcagacctcctagaggccttcgttggaaacgggatttcttcatattctgctagacagaagaattcccagtaacttctttctgttgtgtgtgttcaactcacagagttgaactttgatttacacagagcagatttgaaacactctttttgtggaatttgcaagtggagatttcaagcgctttgaggccaaaggcagaaaaggaaatatcttcgtataaaaactagacagaatcattctcagaaactgctgcgtgatgtgtgcgttcaactctcagagtttaacttttcttttcattcagcggtttggaaacactctgtttctaaagtctgcacgtggatattttgaccacttagacgccttcgttggaaacgggtttttttcatgtaaggctagacagaagaattcccagtaacttccttgtgttgtgtacattcaactcacagagttgaacgttcccttagacagagcagatttgaaacactctttttgtgcaattggcaagtggtgatttcagccgctttgaggtcaatggtagaaaaggaaatatcttcgtataaaaactagacagaatcattcccacaaactgcgttgtgatgtgttcgttcaactcacagagtttaacctttcttttcatagaccagttaggaaacagtctgtttgtaaattctgtaagtggatattctgacatcttgtggccttcgttggaaacgggatttcttcatattctgctagacagaagaattctcagtaacttccttgtgttgtgtgtattcaactcacagagttgaacgatcctttacacagagcagacttgtaacactctttttgtggaatttgcaagtggggatttcagccgctttgaagtcaaaggtagaaaaggaaatatcttcctataaaaactagacagaatgattctcagaaactcctttgtgatgtgtgtgttcaactcacagagtttaaccttacttttcatagagcagttaggaaacactctgtttgtaaagtctgcaagtggatattcagacctctttgaggccttcgttggaaacgggtttttttcatataaggctagacagaagaattcccagtaacttccttgtgttgtgtgtgttcaactcacagagttgaactttcatttacacagagcagatttgaaacactctttttgtggaatttgcaagtggagatttcaagcgctttgaggccaaaggcagaaatggaaatatcttcgtttcaaaactagacagaatcattctcagaaactgctctgcgatgtgtgcattcaactctcagagtttaacttttcttttcattcagcagtttggaaacactctgtttgtaaagtctgcacgtggatattttgaccacttagaggccttctttggaaacgggtttttttcctgtaaggctagacagaagaattcccagtaacttccttgtgttgtgtgcattcaactaacagagttgaacgttcccttaaacagagcagatttgaaacactctatttgtgcaatttgcaagtgtagatttcaagcgctttaaggtcaacggcagaaaaggaaatatcttcgtttcaaaactagacagaatcattcccacaaactgcgttgtgatgtgttcgttcaactcacagagtttaaccattcttttcatagagcagttaggaaacagtctgtttgaaaattctgtaagtggatattctgacatcttgtggccttcgttggaaacgggatttcttcatattctgctagacagaagaattctcagtaacttccttgtgttgtgtgtattcaactcacagagttgaacgatcctttacacagagcagacttgaaacactctttttgtggaatttgcaagtggagatttcagccgctttgaggtcaatggtagaaaaggaaatatctttgtataaagactagacagaatgattctcagaaactcctttgtgatgtgtgcgttcaactcacagagttcaacttttcttttcatagagcagttaggaaacactctgtttgtaaagtctgcaagtggatattcagacctctttgaggccttcgttggaaacgggattttttcatattctgctagacagaagaattcccagtaacttccttgagttgtgtgtgttcaaatcacagagttgaactttcatttacacagagcagatttgaaacactctttttgtggaatttgcaagtggagatttcaagcgctttgaggccaaaggcagaaaaggaaatatctccgtttcaaaactagacagaatcattctcagaaaatgctctgtgaagtgtgcgttcaactctcagagtttaacttttcttttcattcagcagtttggaaacactctgtttgtaaagtctgcacgtggatattttgaccacttagaggccttcgttggaaacgggtttttttcatgtaagggtagacagaagaattcccagtaacttccttgtgttgtgtacattcaactcacagagttgaacgttcccttagacagagcagatttgaaacactctttttgtgcaattggcaagtggtgatttcagcctctttgaggtcaatggtagaaaaggaaatatcttcgtataaaaactagacagaatcattcccacaaactgcgatgtgatgtgttcgttcaactcacagagtttaacctttctgttcatagagcagttaggaaacactctgtttggaaagtctgtaagtggatattctgacatcttgtggccttcgttggaaacgggatttcttcatattctgctagacagaagaattctcagtaacttcccttgtgttgtgtgtattcaactcacagagttgaacgatcctttacacagagcagacttgaaacactctttttgtggaatttgcaagtggagatttcagccgcgttgaggtcaatggtagaaaaggaaatatcttcgtataaaaactagacagaatgattctcagaaactcctttgttatgtgtgcgttcaactcacagagtttaacttttcttttcatagagcagttaggaaacactctgtttgtaaagtctgcaagtggatattcagacctctttgacgccttcgttggaaacgggatttcttcatattctgctagacagaagaattctcagtaacttccttgtgttgtgtgtattcaactcacagagttgaacgatcctttacagagagcagacttgaaacactctttttgtggaatttgcaagtggagatttcagccgctttgaggtcaatggtagaaaaggaaatatcttcctctaaagactagacagaatcattctcagaaactgctctgcgatgtgtgcgttcaactctcagagtttaacttatcttttcattcagtagtttggaaacactctgtttgtaaagtctgcacgtggataatttgaccacttagaggtcttcgttggaaacgggtttttttcatgtaaggctagacagaagaattcccagtaacttccttgtgttgtgtacattcaactcacagagttgaacgttcccttagaaagagcagatttgaaacactctttttgtgcaattggcaagtggagatttcaagcaatttaaggtcaatggcagaaaaggaaatatcttcgtttcaaaactagacagaatgattctcagaaactcctttgtgatgtgtgcgttcaactcacagagtttaacttttcttttcatagagccgttaggaaacactctgtttgtaaagtctgcaagtggatattcagacctctttgaggccttcgttggaaacgggatttcttcatattctgctagacagaagaattctcagtaacttccttgtgttgtgtgtattcaactcagagacttgaatgatcctttacacagaacagtcttgaaacactctttttgtggaatttgcaagtggagatttcagccgctttgaggtcaatggtagaataggaaatatcttcctatagaaactagacagaacgattctcagaaactcctttgtgatgtgtgcgttcaactcacagagtttaacctttcttttcatacagcagttaggaaacactctgtttgtaaagtctgcaagtggatattcagacctctttgagaccttcgttggaaacgggatttcttcatattctgctagacagaagaattctcagtaacttccttgtgttgtgtgtattcaactcacagagttgaatgatcctttacagagagcagacttgaaacactctttttgtggaatttgcaagtggagatttcagccgctttgaggtcaatggtagaataggaaatatcttcgaagaaaaactatacagaatgattctcagaaactgctttttgatgtgtgcgttcaactcacagcgtttaacctttcttttcatagagcagttaggaaacactctgtttgtaaagtctgcaagtggatattcagacctctttgaggccttcgttggaaacgggatttcttcatattctgctagacagaggaattctcagtaacttccttgtgttgtgtgtattcaactgacagagttgaactttcatttagagagagcagatttgaaacactgtttttgtggaatttgcaagtggagatttcaagcgctttggggccaaaggcagaaaaggaaataccttcgtataaaaactagacagaatcattctcagaaactgctgcgtgatgtttgcgttcaactctcagagtttaacttttcttttcattcagcggtttggaaacactctgtttgtaaagtctgcacgtggaaattgtgaccacttagaggccttcgttggaaacgggtttttttcatgtaaggctagacagaagaattcccagtaacttccttgtgttgtgtgcattcaactcacagagttgaacgttcccttagacagagcagatttgaaacactctatttgtgcaatttgcaagtgtagttttcaagctctttaaggtcaacggcagaaaaggaaatatcttggtttcaaaactagacagaatcattcccagaaactgcgttgtgatgtgttcgttcaactcacagagtttaacctttctgttcatagagcagttaggaaacactctgtttgtaaagtctgtaagtggatattcagacatcttgtggccttcgttggaaacgggatttcttcatattctgctagacagaagaattctcagtaacttccttgtgttgtgtgtattcaactcacagagttgaacgatcctttacacagagcagacttgaaacactctttttgtggagtttgcaagtggagatttcagccgctttgaggtcaatggtagaaaaggaaatatcttcgtataaagactagacagaacgattctcagaaactcctttgtgatgtgtgcgttcaactcacagagtttaacctttcttttcatagagcagttaggaaacactctgtttgtaaagtctgcaagtggatattcagacctctttgaggccttcgttggaaacgggatttcttcatattctgctagaaagaagaattctcagtaacttccttgtgtggcgtgtattcaactgacagagttgaactttcatttagagagagcagatttgaaacactgtttttgaggaatttgcaagtggagatttcaagcgctttggggccaaaggcagaaaaggaaatatcttcgtataaaaactagacagaatcattctcagaaactgctctgcgatgtgtgcgttcaactctcagagtttaaatttccttttcattcagcagtttggaaacactctgtttgtaaagtctgcacgtggataacttgaccacttagaggccttcgttggaaacgggtttttttcatgtaaggctagacagaagaattcccagtaacttccttgtgttgtgtgcattcaacacacagagttgaacgttcccttagacagagcagatttgaaacactctatttgtgcaatttgcaagtgtagatttcaagcgctttatggtcaacagcagaaaaggaaatatcttcgtttcaaaactagacagaatcattctcagaaactgctgcgtgatgtgtgcgttcaactctcagagtttaacttttcttttcattcagctgtttggaaacactctgtttgtaaagtctgcaagtggatattcagacctcttgaggccttcgttggaaacgggatttcttcatattatgctagacagaataattctcagtaacttccttttgttctgtgtattcaactcacagagttgaacgatcctttacagagagcagacttgaaacactctttttgtggaatttgcaagtggagatttcagccgctttgaggtcaatggtagaaaaggaaatatcttcgtataaagactagacagaatcattctcagaaactgctctgcgatgtgtgcgttcaactctcagagtttaacttttcttttcattcagctgtttggaaacactctgtttgtaaagtctgcacgtggatattttgaccacttagaggccttcgttggaaacgggtttttttcctgtaaggctagacagaagaattctcagtaacttccttgtgttgtgtgtattcaactcacagagttgaatgatcctttacacagagcagacttgaaacactctttttgtggaatttgcaagtggagatttcatccgctttgaggtcaatggtagaaaaggagactatcttcatataaagactagacagactgattcccagaaactcctttgtgatgtgtgcgttcaactcacagagtttaacctttcttttcatagagcagttaggaaacactctgtttgtaaagtctgcaagtggatattcagacctctttgaggccttcgttggaaacgggtttttttcatataaggctagacagaagaattctcagtaacttccttgtgttgtgtgtattcaactgacagagttgaactttcatttagggagagcagatttgaaacactgtttttgtggaatttgcaagtggagatttcaagcgctttggggccaaaggcagaaaaggaaatatcttcgtataaaaactagacagaatcattctcagaaactcctgcgtgatgtgtgcgtccaactctcagagtttaacttttcttttcattcagcggtttggaaacactctgtttgtaatgtctgcacgtggttattttgaccacttagaggccttcgttggaaacgggtttttttcatgtaaggctagacagaagaattcacagtaacttccttgtgttgtgtgcattcaactcacagagttgaacgttcccttagacagagcagatttgaaacactctatttgtggaatttgcaagtgtagatttcaagcgctttaaggtcaatggcagaaaaggaaatatcttcgtttcaaaactagacagaatccttcccacaaactgcgttgtgatgtgttcgtccaactcacagagtttaacttttcttttcatagagcagttaggaaacagtctgtttgtaaagtctgtaagtggatattctgacctcttgtggccttcgttggaaacgggatttcttcatattctgctagacagaagaattctcagaatcttccttgtgttgtgtgtattcaactcacagagttgaacgatcctttacacagagcggacttgaaacactctttttgtggaatttgcaagtggagatttcagccgctttgaggtccatggtagaaaaggaaatatcttcgtataaaaactagacagaatgattctcagaaactcctttgtgatgtgtgcgttcaactcacagagtttaacctttcttttcatagagcagttaggaaacactctgtttgtaaagtctgcaagtggatattcagacctccctgaggccttctttggaaacgggatttgtccatattatgctagacagaagaattctcagtaacttccttgtgttgtgtgtattcaactgacagagttgaactttcatttagagagagcagatttgaaactctgtttttgtggaatttgcaagtggagatttcaagcgctttggggccaaaggcagaaaaggaaatatcttcgtataaaaactagacagaatcattctcagaaactgctgcgtgatgtgtgcgttcaactctcagagtttaacttttcttttcattcagcggtttggaaacactctgtttgtaaagtctgcacgtggaaaatttgaccacttagaggccttcgttggaaacgggtttttttcatgtaaggctagacagaagaattcccagtaacttccttgggttgtgtgcattcaactcacagagttgaacgttcccttagacagagcagatttgaaacactctatttgtgcaatttgcaagtgtagatttcaagcgctttaaggtcaacggcagaaaaagaaatatcttcttttcaaaactagacagaatcattcccacaaactgcgctgtgatgtgttcgttcaactcacagagtttaacctttctgttcatagagcagttaggaaacactctgtttgtaaagtctgcaagtggatattcagacctccttgaggccttcgttggaaacgggatttcttcatattctgctagacagaagaattctcagtaacttccttgtgttgtgtgtattcaactcacagagttgaacgatcctttacacagagcagacttgaaacactctttttgtggaatttgcaagtggagatatcagccgctttgaggtcaatggtagaataggaaatatcttcatataaaaactagacagaatgattctcagaaactcctttgtgatgtgtgcgttcaactcacagagtttaacctttcttttcatagagcagttaggaaacactctgtttgtaaagtctgcaagtggatattcagacatccttgaggctttcgttggaaacgggatttctttatattctgctagaaagaataattctcagtaacttccttgtgttgtgtgtattcaactcacagatttgaacgatccattacagagagcagacttgaaacactctttttgtggaatttgcaagtggagatttcagccgctttgaggtcaatggtagaataggaaatatcttcctatagaaactagacagaatgattctaagaaactcctttgtgatgtgtgcgttcaactcacagagtttaacctttcttttcatagagcagttaggaaacactctgattgtaaagtctgcaagtggatattcagacctccttgaggccttcgttggaaacgggatttcttcatattatgctagacagaagaattctcagtaacttccttgtgttgtgtgtatgcatctcactgagttgaacgatcctttgcacagagcagacttgaaacactctttttgtggaatttgcaagtggagatttcagccgctttgaggtcaatggtagaaaaggaaatatcttcgtataaaaactagacagaatgattctcagaaacttctttgtgatgtgtgcgttcaactcacagagtttaacctttcttttcatagagcagttaggaaacactctgtttgtaaactctgcaagtggatatatagacctctttgaggccttcgttggaaacgggatttcttcatagtatgctagacagaagaattctcagtaacttccttgtgttgtgtgtattcaactgacagagttgaactttcatttagagagagcagatttgaaacactgtttttgtggaatttacaagtggagatttcaagcgctttggggccaaaggcagaaaaggaaatatcttcgtataaaaactagacagaatcattctcagaaactgctgcgtgatgtgtgcgttcaactctcagagtttaacctttcttttcattcagcggtttggaaacactctgtttgtaaagtctgcacgtggatattttgaccacttagaggccttcgttggaaacgggtttttttcatgtaaggatagacagaagaaattcccagtaacttccttgtgttgtgtgcattcaactcacagagttgaacgttcccttagacagagcagatttgaaacactctatttgtgcaatttacaagtgtagatttcaagcgctttaaggtcaacggcagaaaaggaaatatcttcgtttcaaacctagacagaatcattcccacaaactgcgttgtgatgtgttcgttcaactcacagagtttaacctttctgttcatagagcagtaaggaaacactctgtttctaaagtctgtaagtggatattctgacatcttgcggccttcgttggaaacgggatttcttcatattctgctagacagaagaattctcagtaacttccttgtgttgtgtgtattcaactcacagagttgaacgatcctttacacagagcagacttgaaacactctttttgtggaatttgcaagtggagatttcagccgctttgaggtcaatggtagaaaaggaaatatcttcgaataaagactagacagaatgattctcagaaaatcttttgtgatgtgtgcgttcaactcacagagtttaacttttcttctcatagagcagttaggaaacactctgtttgtaaagtctgcaagtggatattcagacctcttagaggtcttcgttggaaacgggatttcttcatattatgctagacagaagaattctcagtaacttccttgtgttgtgtgtattcaactgacagagttgaactttcatttagagagagcagatttgaaacactgtttttgtggaatttgcaagtggagatttcaagcgctttggggccaagggcagaaaaggaaatatcttcgtataaaaactggacagaatcattctcagaaactgctgcgtgatgtgtgcgttcaactctcagagtttaacttttcttttcattcagcggtttggaaacactctgtttgtaaagtctgcacgtggatattttgaccacttagaggccttcgttggaaacgggttttttttcatgtaaggctatacagaagaattcccagtaacttccttgtgttgtgtgcattcaactcacagagttgaacgttcccttagacagagcagatgtgaaacactctatttgtgcaatttgcaagtgtagatttcaagcgctttaaggtcaatggcagaaaaggaaatatcttcgtttcaaaactagacagagatcattcccacaaactgcgttgtgatgtgttcgttcatctcacagagtttaacctttcttttcatagagcagttaggaaacactatgtttgtaaattctgtaagtggatattctgacatcttgtggccttcgttggaaacgggatttcttcatattctgctagacagataattctcagtaacttccttgtgttctgtgtattcaactcacagagttgaacgatcctttacagagagcagactttaaacactctttttgtggaatttgcaagtggagatttcagccgctttgaggtcaatggtagaaaaggaaatatcttcgtacaaagactagacagaatgattctcagaaactcctttgtgatgtgtgcgttaaactcacagagttttacctttctgttcatagagcagttaggaaacactctgtttgtaaagtctgcaagtggatattcagacctccttgaggccttcgttggaaacgggatttcttcatattctgctagacagaagaattctcaataacttccttgttttgtgtgtattcaactcacagagttgaacgatcctttacacagagcagacttgtaacactctttttgtggaatttgcaagtggagatttcagccgctttgaagtcaaaggtagaaaaggaaatatcttcctataaaaactagacagaatgattctcagaaactcctttgtgctgtgtgcgttcaactcacagagtttaacctttcttttcatagagcaattaggaaactctctgtttgtaaagtctgcaagtggatattcagacatctttgaggctttcgttggaaacgggatttcttcatattctgctagacagaagaattctcagaaatttccttttgttgtgtgttttcaactcacagagttgaacgaacctttacacagagtagacttgaaacactctttttgtggaattggcaagtggagatttcagccgctttgaggtcaatggtagaaaaggaaatatcttcgtataaaaactagacagaatgattctcagaaacttctttgtgatgtgtgcgttcaactcacagagtttaacctttcttttcatagagcagttagggaacactctgtttgtaaactctgcaagtggatattcagacctctttgaggccttcgttggaaacgggatttcttcatactatgctagacagaagaattctcagtaacttccttgtgttgtgtgtattcaactcatagagttgaacgatcctttacacagagcagacttgtaacactctttttgtggaatttgcaagtggagatttcagccgctttgacgtcaaaggtagaaaaggaaatatcttcctataaaaactagacagaatgattctcataaactcctttgtgatgtgtgcgttcaacgcacagagtttaacctttcttttcatagagcagttaggaaacactgtgtttgtaaagtctgcatgtggatattcagacctccttgaggccttcgttggaaacgggaattcctcatattctgctagacagaagaattcccagtaacttccttgtgttgtgtgtgttcgactcacagagttgaactttcatttacacagagcagatttgaaacactctttttgtggaatttgcaaatggagatttcaagcgctttgaggccaaaggcagaaaaggaaatatctttgtataaaaactagacagaatcattctcagaaactgctctgcgatgtgtgcgttcaactctcagagtttaacttttcttttcattcagcagtttggaaacactctgtttgtaaagtctgcacgtggataacttgaccacttagaggccgtcgttggaaacgggttttgttcatgtaaggctagacagaagaattcccagtaacttccttgtgttgtgtacattcaactcacagagttgaacgttcccttagacagagcagatttgaaacactctttttgtggaattggcaagtggtgatttcagccgctttgaggtcaatggtagaaaaggaaatatcttcgtataaaaactagacagaatcattcccacaaactgcgttgtgatgtgttcgttcaactcacagagtttaacctttcttttcatagaccagttaggaaacagtctgtttgtcaattctgtaagtggatattctgacatcttgtggccttcgttggaaacgggatttcttcatattctgctagaaagaagaattctcagaatcttccttgtgttgtgtgtattcaactcaaagagttgaacgatcctttacacagagcaggcttgaaacactctttttgtggaatttgcaagtggagatttcagccgctttgaagtcaatggtagaaaaggaaatatcttcgtataaaaactagacagaatgattctcagaaacttctttgtgatgtgtgcgttcaactcacagagtttaacctttcttttcatagagcagttaggaaacactctgtttgtaaactctgcaagtggatattcagacctctttgaggccttcgttgtaaaagggatttcttcatactatgctagacagaagaattctcagtaacttccttgtgttgtgtgtattcaactcacagagttgaacgattctttacacagagcagacttgtaacactctttttgtggaatttgcaagtggagatttcagcctctttgaagtcaaaggtagaaaaggaaatatcttcctataaaaactagacagaatgattctcagaaactcctttgtgatgtgtgcgtgcaactcacagagtttaacttttcttttcatagagcagttaggaaacactctgtttgtaaagtctggaagtggatattcagacctccttgaggccttcgttggaaacgggatttcttcatattctgctagacagaagaattcccagtaacttccttgtgttgtgtgtgttcgactcacagagttgaactttcatttacacagagcagatttgaaacactctttttgtggaatttgcaaatggagatttcaagcgctttgaggccaaaggcagaaaaggaaatatcttcgtataaaaactagacagaatgattctcagaaactcctttgtgatgtgtgtgttcaactcacagagattaacctttcttttcatagagcagttaggaaacactctgtttgtaaagtctgcaagtggatattcagacctctttgaggccttcgttggaaacgggatttctccatactatgctagacagaagaattctcagtcacttccttgtgttgtgtgtattcaactcacagagttgaacgatcctttacacagagcagacttgaaacactctttttgtggaatttgcaagtggagatttcagcagctttgaggtcaatagtagaaaaggaaatatcttcgtagaaaaactagacagaatgattctcagaaactcctttgtgatgtgtgcgttcaagtcacagagtttaacctttcttttcatagagcagttaggaaacactctgtttgtaaagtctgcaagtggatattcagacctctttgaggccttcgttggaaacgggatttcttcatattctgttagacagaagaattctcagtaacttcccttgtgttgtgtgtattcaactgacagagttgaactttcatttagagagagcagatttgaaacactgtttttgtggaatttgcaagtggagatttcaagcgctttgtggccaaaggcagaaaacgaaatatcttcgtataaaaactagacagaatcattctcagaaactgctctgcgatgtgtgcgttcaactctcagagtttaactttgcttttcattcagcagtttggaaacactctgtttgtaaagtctgcacgtggataatttgaccacttagaggccttcgttggaaacgggtttttttcctgtaaggctagacagaagaattctcagtaacttccttgtgttgtgtgtattcaactcacagagttgaacgatcctttacagagagcagactttaaacactctttttgtggaatttgcaagtggagatttcagccgctttgaggtcaatggaagaaaaggaaatatcttcgtataaagactagacagaatgattctcagaaactcctttgtgatgtgtgcgttcaactcacagagtttaacctttcttttcatagagcagttaggaaacactctgtttgtaaagtctgcaagtggatattcagacctctttgaggccttcgttggaaacgggttttttccatataaggctagtcagaagaattctcagtaacttccttgtgttgtgtgtgttcaactcacagagttgaaatttcatttacacagagcagatttgaaacactctttttgtggaaattgcaaatggagatttcaagcgctttgaggccaaaggcagaaaaagaaatatcttcgtataaaaactggacagaatcattctcagaaactgctctgcgatgtgtgcgttcaactctcagagtttaactttgcttttcattcagcagtttggaaacactctgtttgtaaagtctgcacgtggataatttgaacacttagaggccttcgttggaaacgggtttttttcatgtaaggctagacagaagaattcccagtaacttccttgtgttgtgtacattcaactcacagagttgaacgttcccttagacagagcagatttgaaacactctttttgtgcaattggcaagtggtgatttcagccgctttgaggtcaatggtagaaaaggaaatatcttcgtataaaaactagacagaatgattctcagaaactcctttaggatgtgtgcgttcaactcacagggtttaacctttcttttcatagagtagttaggaaacactctgtttgtaaactctgcaagtggatattcaaacctctttgaggccttcgttgcaaacgggatttcttcatattattgctgacagaagaattctcagaaacttcccttgtgttttgtgtattcaactcacagagttgaacgatcctttaaacagagcagacttgaaacactctttttgtggaatttgcaagtggagatttcagccgctttgaggtcaatggtagaaaaggaaatatcttcgtataaaaactagacagaatgattctgagaaactcctttgtgatgtgtgcgttcaactcacagagtttaacctttcttttcatagagcagttaggaaacactctgtttgtaaagtctgcaagtggatattcagacctctttgaggccttcgttggaaacgggattttttcatataaggctagacagaagaattctcagtaacttccttgtgttgtgtgtattcaactcacagagttgaacgatcctttacacagagcagacttgaaacagtctttttgtggaatttgcaagtggagatttcagccgctttgaggtcaatggtagaataggaaatatcttcctatagaaactagacagaatgattctcagaaactcctttgtgatgtgtgcgttcaactcacagagtttaacctttcttttcatagagcagttaggaaacactctgtttgtaaagtctgcaagtggatattcagacatccttgaggctttcgttggaaacgggatttcttcatattctgctagacagaagaattcccagtaacttccttgtgttgtgtgtgttcaattcacagagttgaactttcatgtacacagagcagatttgaaacactctttttgtggaatttgcaaatggagatttcaagcgctttgaggccaaaggcagaaaaggaaatatcttcgtataaaaactagacagaatcattctcagaaactgctctgcgatgtgtgcgttcaactctcagagtttaacttttcttttcattcagcagtttggaaacactctgtttgtaaagtctgcacgtggatattttgaccacttagaggccttcgttggaaacggttttctttcctgtaaggctagacagaagaattcccagtaacttccttgtgttgtgtgcattcaactcacagagttgaacgttcccttagactgagcagatttgaaacactctatttgtgcaatttgcaagtgtagatttcaagcgctttaaggtcaatggcagaaaaggaaatatcttcgtttcaaaactagacagaatcattcccacaaactgcgttgtgatgtgttcgttcaactcacagagtttaacctttctgttcatagagcagttaggaaacactctgtttgtaaagtctgcaagtggattttgagacctccttgaggccttcgttggaaacgggatttcttcatattctgctagacagaagaattctcagtaacttccttgtgttgtgtgtattcaactcacagagttgaacgatcctttacacagagcagacttgtaacactctttttctggaatttccaagtggagatttcagccgctttgaagtcaaaggtagaaaaggaaatatcttcctataaaaactagacagaatgattatcataaaatcctttgtgatgtgtgcgttcaactcacagagtttaacttttcttttcatagagcagttaggaaacactctgtttgtaaagtctgcaagtggatattcagacccctttgaggccttcgttggaaacgggatttcttcatattatgctagacagaagaattcccagtaacttccttgtgttgtgtgtgttcaactcacagagttgaactttcatttacacagagcagatttgaaacactctttttgtggaatttgcaagtggagatttcaagcgctttgaggccaaaggcagaaaaggaaatatcttcggtataaaaactagacagaatgattctcagaaactcctttgtgatgtgtgcgttcaactcacagagtttaacctttcttttcatagagcagttaggaaacactctgtttgtaaagtctgcaagtggatattcagacctctttgaggccttcgttggaaacgggatttcttcataatatgctagacagaagaattctcagtaacttccttgtgttgtgtgtattcaactcacagagttgaacgaacctttacacagagcagacttgaaacactctttttgtggaatttgcaagtgtagatttcatccgctttgaggtcaatggtagaaaaggaaatatcttcgtataaaaactagacagaatgattctcataaactcctttgtgatgtgtgcgttcaactcacagagtttaacttttcttttcatagagcagttaggaaacactctgtttgtaaagtctgcaagtggatattcagacctccttgactccttcgttggaaacgggatttcttcatattctgctagacagaaggattcccagtaacttccttgtgttgtgtgtgttcaactcacagagttgaactttcatttacaaagagcagatttgaaacactctttttgtggaatttgcaattggagatttcaagcgctttgaggccaaaggcagaaaaggaaatatcttcgtataaaaactagacaaaatgattctcagaatcttctttgtgatgtgtgtgttcaactcacagagtttaacctttcttttcatagagcagttaggaaacactctgtttgtaaactctgcaagtggatattcagacctcattgaggctttcgttggaaacgggatttcttcatactctgctagacagaagaattctcagtaacttccttgtgttgtgtgtattcaactcacagagttgaacgaccctttacacagagcggacttgaaacactctttttgtggaatttgcaagtggagatttcagccgcgttgaggtcaatggtagaaaaggaaatatcttcgtatagaaacttgacagaatgattctcagaaactcctttgtgatgtgtgcgttcaactcacagagttcaacctttcttttaatagagcagttgggaaacactctgtttctaaagtctgcaagtggatattcagacttctttgaggccttcgttggaaacgggatttcttcatattctgctagacagaagaattctcagtaacttccttgtgttgtgtgtattcaactgacagagttgaactttcatttagagagggcagatttgtaacactgtttttgtggaatttgcaagtggagatttcaagcgctttgcggccaaaggcagaaaaggaaatatcttcgtataaaaactagacagaatcattctcagaaactgctgcgtgacgcgtgcgttcaactctcaaagtttaacttttcttttcattcagcggtttggaaacactctgtttgtaaagtctgcacgtggatattttgaccacttagaggccttcgttggaaacgggtttttttcatgtaaggctagacagaagaattcccagtaacttccttgtgttgtgtacattcaactcacagagttgaacgttcccttagaaagagcagatttgaaacactctttttgtgcaattggcaagtggtgatttcagccgctttgaggtcaatggtataaaaggaaataccttcgtataaaaactagacagaatcattcccacaaactgcgttgtgatgtgttcgttgaactcacagagtttaacctttcttttcatagagcagttaggaaacagtctgtttgtaaattctgtaagtggatattctgacatcttgtggccttcgttggaaacgggatttcttcatattctgctagacagaagaattctcagaaacttccttgtgttttgtgttttcaactcacagagttgaacgatgctttacacagagtagacttgaaacactctttttgtgtaatttgcaagtggagatttcagccgctttgaggtcaatggtagaaaaggaaatatcttcgtataaaaactagacagaatgattctcagaaactcctttgtgatgtgtgcgttcaactcacagagtttaacctttcttttcatagagcagttaggaaacactctgtttgtaaagtctgcaagtggatattcagacctccttgaggccttcgttggatacgggatttcttcatattatgctagacagaagaattctcagtaacttccttgtgttgtgtgtattcaactcacagagttgaacgatcctttacacagagcagagttgaaacactctttttgtggaatttgcaagtggagatttcagccgctttgaggtcaatggtagaataggaaatatcttcctatagaaactagacagaatgattctcagaaaatcttttgtgatgtgtgcgttcaactcacagagtttaacttttcttctcatagagcagttaggaaacactctgtttgtaaagtctgcaagtggatattcagacctctttgaggccttcgttggaaacgggatttcttcatattatgcaagacagaataattctcagtaacttccttgtgttgtgtgtattcaactcacagagttgaaggatcctttacagagagcaggcttgaaacactctttttgtcgaatttgcaagtggagatttcagccgctttgaggtgaatggtagaataggaaatatcttcttatagaaactagacagaatcattctcagaaactgctctgcgatgtgtgcgttcaactctcagagtttaacttttcttttcattcagcagtttggaaacactctgtttgtaaagtctgcacgtggataatttgaccacttagaggccttcgttggaaacgggtttttttcatataaggctagacagaagaattcccagtatcttccttgtgttgtgtgcattcaactcacagagttgaacgttcctttagacagagcagattggaaacactctttttgtgcaatttgcaagtggagatttcaagcgctttaagggcaattgcagaaaaggaaatatcttcgtttcaaaactagacagaatcattcccacaaactgcgttgtgatgggtgcgttcaactcacagagtttaacctttcttttcatagagcagttaggaaacactctgtttgtaaagtctggaagtggatattctgacctctttgtggccttcgctggaaccgggatttcttcatataatactagacagaagaattctcagtaacttctttgtgttgtgtgtattcaactcacagagttgaacgatcctttacacagagcagacttgaaacactcgttttgtggaatttgcaagtggagatttcagccgctttgaggtccatggtagaaaaggaaatatcttcgtataaaaacttgacagaatgattctcatgaactcctttgtgatgtgtgcgttcaactcaaagagtttaacctttctgttcatagagcagttaggaaacactctgtttgtaaagtctgcaagtggatattcagacctccttgaggccttcgttggaaacgggatttcttcatattctgctagacagaagaattctcagtaacttccttgtgttgtgtgtattcaactcaaagagttcaacgatcctttatacagagcagacttgaaacactctttttgtggaatttgcaaatggagatctcagccgctttgtggtcagtagtagaaaaggaaatatcttcgtataaaaactagacagaatgattctcagaaacttctttgtgatgtgtgcgttcaactcacagagtttaacctttcttttcatagagcagttaggaaacactctgtttgtaaagtctgcaagtggatattcagacctctttgagcccttcgttggaaacgggtttttttcatttaaggctagacagaagaattctcagtaacttccttgtgttgtgtgtattcaactcaaagagttgaactttcatttagagagagcagatttgaaacactgtttttgtggaatttgcaagtggagatttcaagcgctttggggccaaaggcagaaaaggaaatatcttcgtataaaaactagacagaatcattctcagaaaactgctctgtgatgtgtgcgttcaactctcagagtttaacttttcttttcattcagcagtttggaaacactctgtttctaaagtctgcacgtggataatttgaccacttagaggccttcgttggaaacgggtttttttcatgtaaggctagacagaagaattcccagtaacttccttgtgttgtgtgcattcaactcacagagttgaacgttcccttagacagagcagatttgaaacactctatttgtgcaatttgcaagtgtagatttcaagcgctttaaggtcaacggcagaaaaggaaatatcttcgtttcaaaactagacacaatcattctcagaaactgctctgcgatgtgtgcgtgcaactctcagagtttaacttttcttttcattcagcagtttggaaacactctgtttgtaaagtctgcacgtggataacttgaccacttagaggccttcgttggaaacgggtttttttcatgtaaggctagacagaagaattctcagtaacttccttgtgttgtgtgtattcaactcacagagttgaacgatcgtttacacagagcagacttgtaacactctttttgtggaatttgcaagtggagatttcagccactttgaagtcaaaggtagaaaaggaaataacttcctataaaaactagacagaatgattctcagaaacttctttgtgatgtgtgcgttcaactcacagagtttaacctttcttttcatagagcagttaggaaacactctgtttgtaaactctacaagtggatattcacacctctttgaggccttcgttggaaacgggatttcttcatactgtgctagacagaagaattctcattaacttccttgtgttgtgtgtattcaactgacaaagttgaactttcatttagagagagcagatttgaaacactgtttttgtggaatttgcaagtggagatttcaagcgctttggggccaaaggcagaaaaggaaatatcttcgtataaaaactagacagaatcattctcagaaactgctccgtgatgtgtgcgttcaactctcagagtttaacttttcttttcattcagcggtttggaaacactctgtttgtaaagtctgcacgtggaaattttgaccacttagaggccttcgttggaaacgggattttttcatgtaaggctagacagaagaattccccgtaacttccttgtgttgtgtgcattcaactcacagagttgaacgttcccttagacagagcagatttgaaacactctatttgtgcaatttgcaagtgtagttttcaagctctttaaggtcaacggcagaaaaggaaatatcttcgtttcaaaactagacagaatcattcccacaaactgcgttgtgatgtgttcgttcaactcacagagtttaacctttctgttcatagagcagttaggaaacactctgtttgtaaagtctgtaagtggatattctgacatcttgtggccttcagttggaaacgggatttcttcatattctgctagacagaagaattctcagtaacttccttgtgttgtgtgtattcaactcacagagttgaacgatcctttacacagagcagacttgaaacactctttttgtggaatttgcaactggagatttcagccgctttgaggtcaatggtagaaaaggaaactatcttcatataaagactagacagaatgattctcagaaactcctttgtgatgtgtgcgttcaactcacagagtttaacctttcttttcatagagcagttaggaaacactctgtttgtaaagtctgcaagtggatattgagacatctttgaggctttcgttggaaacaggatttcttcatattctgctagacagaagaattctcagtaacttccttgtgttgtgtgtattaaactgacagagttgaactttcatttagagagagcagatttgtaaaactgtttttgtggaatttgcaagtggagatttcaagcgctttggggccaaaggcagaaaaggaattatcttggtataaaaactagacagaatcattctcagaaactgctctgcgatgtgtgcgttcaactctcagagtttaacttttcttttcattcagcagtttggaaacactctgtttgtaaagtctgcacgtggataacgtgaccacttagaggccttcgttggaaacgggtttttttcatgtaaggctagacagaagaattctcagaaacttccttgtgttgtgtgtattcaactcacagagttgaatgatcctttacacagagcagacttgaaacactctttttgtggaatttgcaagtggagatttcagccgctttgaggtcaatggtagaataggaaatatcttcctatggaaactagacagaatgattctcagaaactcctttgtgctgtgtgcgttcaactcacagagtttaacctttcttttcatagagcagttaggaaacactctgtttgttaagtctgcaggtggatattcagacctctttgaggccttcgttggaaaggggatttcttcatattatgctagacagaaagaattctcagtaacttccttgtgttgtgtgtattcaactgacagagttgaactatcatttagagagagcagatttgaaacactgtttttgtggaatttgcaagtggagatttcaagcgctttggggccaaaggcagaaaaggaaatatcttcgtataaaaactagacagaatgattctcagaaactcctttgtgatgtgggcgttcaactcacagagtttaacctttcttttcatagagcagttaggaaacactctgtttgtaaagtctgcaagtggatattcagacctctttgtggccttcattggaaacgggatttcttcatattctgctagagagaagtattctgagaaacttccttgcgttgtgtgtattcaactcacagagttcaacgatcctttacacagagcagacttgaaacactctttttgtggaatttgcaagtggagatttcagccgctttgaggtcaatggtagaataggaaatatcttcgtataaaaactagacagaaatgattctcagaaactcctttgtgatgtgtgcgttcaagtcacagagtttaacctttcttttcatagagcagttaggaaacactctgtttgtaaagtctgcaagtggatattcagacctctttgaggccttcgttggaaacgggatttcttcatattctgctagacagaagaattcccagtaacttccttgtgttgtgtgtcttcaactcacagagttgaactttcatttacacagagcagatttgaaacactctttttgtggaatttgcaaatggagatttcaagcgctttgaggccaaaggcagaaaaggaaatatcttcgtataaaaacttgacagaatcattctcagaaactgctctgcgatgtgtgcgtttaactctcagagtttaacttttcttttcattcagcagtttggaaacactctgtttgtaaagtctgcacgtggataatttgaccacttagaggccttcgttggaaacgggtttttttcatgtaaggctagacagaagaattctcagtaacttccttgtgttgtgtgtattcaactcacagagttgaacgatcctttacacagagcagacttgaaacattcttttggtggaatttgcaagtggagatttcagccgctttgaggtcaatggtagaataggaaatatcttcctatacaaactagacagagtgattctcagaaactcctttgtgatgtgtgcgttcaactcacagagtttaacctttcttttcatagagcagttaggaaacactctgtttctaaagtctgcaagtggatattcagacctctttgaggccttcgttggaaacgggtttttttcatataaggctagagagaagaattcccagtaacttccttgtgttgtgtgtgttccactcacagagttgaactttcgtttacacagagcagatttgaaacactctttttgtggaatttgcaagtggagatttcaagcgctttgaggccaaaggcagaaaaggaaatatcttcgtataaaaactagacagaatcattctcagaaactgctgcgtgatgtgtgcgttcaactctcagagtttaacatttcttttcattcagcggtttggaaacactctgtttgtaaagtctgcacgtggaaattttgaccacttagaggccttcgttggaaacgggtttttttcatgtaaggctagacagaagaattctcagtaacttccttgtgttgtgtgtattcaactcacagagttgaacgatcctttacacagagcagacttgtaacactctttttgtggaatttgcaagtggagatttcagccgctttgaagtcaaaggtagaaaaggaattatcttcctataaaaactagacagaatgattctcagaaactcctttgtgatgtgtgtgttcaactcacagagtttaacatttcttttcatagagcagttaggaaacactctgtttggaaagtctgcaagtggatattcagacctctttgaggccttcgttggaaacgggtttttttcatataaggctagacagaagaattctcagtaacttccttgtgttgtgtgtattcaactgacagagttgaactttcatttagagagagcagatttgaaactctgtttttgtggaatttgcaagtggagatttcaagggctttggggccaaaggcagaaaaggaaatatcttcgtataaaaactagacagaatcattctcagaaactgctgcgtgatgtgtgcgttcaactctcagagtttaacttttcttttcattcagcggtttggaaacactctgtttgtaaagtctgcacgtggataatttgaccacttagaggccttcgttggaaacgggttttttttcatgtaaggctagacagaagaattcccagtaacttccttctgttgtgtgcattcaactcacagagttgaacgttcccttagacagagcagatttgaaacactctatttgtgcaatttgcaagtatagatttcaagcgctttaaggtcaacggcagaaaaggaaatatcttcatttcaaaactagacagaatcattcccacaaactgcgttgtgatgtgttcgctcaacttacagagtttaacctttcttttcatagagcagttaggaaacagtctgtttgtaaattctgtaagtggatattctgacatcttgtggccttcgttggaaacgggatttcttcatattctgctagacagaagaattctcagtaacttccttgtgttgtgtttattcaactcacagagttgaatgatcctttacacagagcagacttgaaacactctttttgtggaaattgcaagtggagatttcagccgctttgaggtcaacggtagaaaagtaaatatcttcgtataaagactagacagaatgattctcagaaactcctttgtgatgtgtgcgatcaactcacagagtttaacctttcttttcatagagcagttaggatacactctgtttgtaaagtctgcaagtggatattcagacatccttgaggctttcgttggaaacgggatttcttcatattctgctagaaagaagaattcccagtaacttccttgtgttgtgtgtgttcaactcacagagttgaactttcatttacacagagcagatttgaaacactctttttgtggaatttgcaagtggaggtttcaagcgctttgaggccaaaggcagaaaaggaaatatcttcgtataaaaactagacagaatcattctcagaaactgctctgcgatgtgtgcgttcaactctcagagtttaacttttcttttcattcagcagtttggaaacactctgtttgtaaagtctgcacgtggataatttcaccacttagaggtcttcgttggaaacgggtttttttcatgtaaggatagacagaagaattcccagtaacttccttgtgttgtgtacattcaactcacagagctgaacgttcccttagacagagcagatttgaaacactctttttgtgcaattggcaagtggtgatttcagctgctttgaggtcaatggtagaaaagggaatatcttcgtataaaaactagacagaatcattcccacaaactgcgttgtgatgtgttcgttcaactcacagagtttaacctttctgttcatagagcagttaggaaacactgtgtttgtaaagtctgtaagtggatattctgacatcttgtggccttcgttggaaacgggatttcttcattttctgctagaaagtataattctcagtaacttccttgtgttgtgtgtattcaactcccagagttgaacgatcctttacacagagcagacttgaaacattctttttgtggaatttgcaagtggagatttcagctgctttgaggtcaatggtagaataggaaatatcttcctatagaaactagacagaatgattctcagaaagtcctttgtgatgtgtgcgttcaactcacagagtttaacctttcttttcatagagcagttaggaaacactctgtttgtaaagtctgcaagtggatattcagacctccttgaggccttcgttggaaacaggatttcttcatattctgctagacagaagaattctcagtaacttcccttgtgttgtgtgtattcaactcacagatttgaacgatcctttacagagagcagacttgaaacactctttttgtggaatttgcaagtggagatttcagctgctttgaggtcaatggtagaaaaggaaatatcttcgtagaaaaactagacagaatgattctcagaaacttctttgtgatgtgtgcgttcaactcacagagtttaacctttcttttcatagagcagttaggaaacactctgcttgtaaactctgcaagtggatattcagacctctttgaggccttcgttggaaacgggatttcttcatactatgctagacacaagaattctcagtaacttccttgtgttgtgtgtattcaactgacagagttgaactttcatttagacagagcagatttgaaacactctttttgtggaatttgcaagtagagatttcaagcgctttgagtccaaaggcagaaaaggaaatatcttcgtataaaaactagacagaatcattctcagaaactgctgcgtgatgtgtgcgttcaactctccgagtttaacttttcttttcattcagcggtttggaaacactctgtttgtaaagactgcacgtggatattttgaccacttagaggccttcgttggaaacgggttttttttcatgtaaggctagacagaagaattcccagtaacttccttgtgttgtgtgcattcaactcacagagttgaacgttcccttagacagagcagatttgaaacactctatttgtgcaatttgcaagtgtagatttcaagcgctttaaggtcaatggtagaaaaggaaatatcttcgtttcaaaactagacagaatcattcccacaaactgcgttgtgatgtgttcgttcaactcacagagtttaacctttcttttcatagagcagttaggaaacagtctgtttgtaaactctgcaagtggatattcagacctctttgaggccttcgttggaaacgggatttctccatactgtgctagacagaagaattctcagtaacttccttgtgttgtgtttattcaactcacagagctgaatgatcctttacacagagcagacttgaaacactctttttgtggaatttgcaagtggagatttcagccgctttgcggtcaatggtagaaaagtaaatatcttcgtataaagactagacagaatgattctcagaaactcctttgtgatgtgtgcgttcaactcacagagttcaacctttcttttcatagagcagttgggaaaccctctgtttgtaaagtctgcaagtggatattcagacttctttgaggccttcgttggaagcgggatttcttcatgttctgctagacagaaggattctcagtaacttccttgtgttgtgtgtattcaactcacagagttgaacgatcctttacacagagcagacttaaaacactctttttgtggaatttgcaagtggagatttcagccgctttgaggtcaatgttagaaaaggagatatcttcgtataaaaactagacagaatgattctcagaaactcctttgtgatgtgggcgttcaactcacagagtttaacctttcttttcatagagcagttaggaaacactctgtttgtaagattgcaagtggatattcagatatctttgaggctttcgttggaaacgggatttcttcatattctgctatacagaagaattctcagaaacttccttgtgttgtgtgtattcaactcacagagttgaacgatcgtttacacagagcagacttgagacactctgtttgtggaatttgtaagtggagatttcagccgctatgaggtcaatggtagaataggaaatatcttcctatagaaactagacagaatcattctcagaaactgctctgtgatgtgtgcgttcaactctcagagtttaacttttcttttcattcagcagtttggaaacactctgtttgtaaagtctgcacgtggataatttgaccacttagaggccttcattggaaaagggtttttttcatgtgaggctagacagaagaattcccagtaacttccttgtgttgtgtacattgaactcacagagttgaacgttcccttagacagagcagatttgaaacactctttttgtgcaattggcaagtggagatttcaagcgctttaaggtcaatggcagaaaaggaaatatcttcgtttcaaaactagacagaatcattcccacaaactgcgttgtgaggtgttcgttcaactcacagagtttaacctttcttttcatagagcagttaggaaacagtctgtttgtaaattctgtaagtggatattctgacatcttgtggccttctttggaaacgggatttcttcatattctgctagacagaagaattctcagtaacttccttgtgttgtgtgtattcaactcacagagttcaacgatcctttacacagagcagacttgaaacactctttttgtggaatttgcaagtggagatttcagccgacttgaggtcaatggtagaaaaggaaatatcttcttataaaaactagacagaatgattctcagaaactcctttgtgatgtgtgcgttcaactcacagagtttaacctttcttctcatagagcagttaggaaacattctgtttgtaaagtctgcaagtggatattcagacctctttgaggccttcgttggaaacgggatttcttcatattatgctagacagaagaattctcagtaacttccttgtgttgtgtgtattcaactcacagagttcaatgatcatttacacagagcagacttcaaacactctttttgtggaatttgcaagtggagatttcagccgacttgaggtcaatggtagaaaaggaaatatcttcgtataaaaactagacagaatgattctcagaaactcctttgtgatgtgtgcgttcaactcacagagtttcacctttcttttcatagagcagttaggaaacactctgtttctaaagtctgcaagtggatattcagacctctttgaggccttcgttggaaacgggtttttttcatataaggctagagagaagaattcccagtaacttccttgtgttgtgtgcgttcaactcacagagttgaactttcatttacacagagcagatttgaaacactctttttgtggaatttgcaagtggagatttcaagcgctttgaggccaaaggcagaaaaggaaatatcttcgtttcaaaactagacagaatcattctcagaaagtgctctgcgatgtgtgcgttcaactctcagagtttaacttttcttttcattcagcagtttggaaacactctgtttgtaaagtctgcgcgtggatattttgaccacttagaggccttcgttggaaacgggtttttttcttgtaaggctagacagaagaattcccaggaacttccatgtgttgtgtacattcaactcacagagttgaacgttcccttagacagagcagatttgaaacactctttttgtgcaattggcaagtggtgatttcagccgctttgaggtcaatggtagaaaaggaaatatcttcgtataaaaactagacagaatgattctcagaaacttcattgtgacgtgtgcgttcaactcacagagtttaacctttcttttcatagagcagttaggaaacactctgtttgtaaagtctgcaagtggatattcagacctctttgaggccttcgttggaaacgggatttcttcctactgtgctagacagaagtattctcagtaacttccttgtgttgtgtgtattcaactcacagagttgaacgatcctttacacagagcagacttgaaacactgtttttgtggaatttgcaagtggagatttcaagcgctttgaggctaaaggcagaaaaggaaatatcttcgtttcaaaactagacagaatcattctcagaaactgctctgcgatgtgtgcgttcaactctcagagtttaacttttcttttcattcataagtttggaaacactctgtttgtaaagtctgcacgtggataacttgaccacttagaggccttcgttggaaacgggtttttttcatgtaaggctagacagaagaattctcagtaacttccttgtgttgtgtgtattcaactcacagagttgaacgatcctttacacagagcagactagaaacactctttttgtggaatttgcaagtggagatttcagcccctttgaggtcaaaggtagaaaaggaaatatcttcgtataaaaactagacagaatgattctcagaaactcctttgtgatgtgtgcgttcaactcacagagtttaacctttcttttcatagagcagttgggaaacactctgtttgtaaagtctgcaagtggatattcagacatccttgaggctttcgttggaaacgggatttcttcatattctgctagaaaggagaattcccagtaacttccttgtgttgtgtgtgttcaactcacagagttgaactttaatttacgcagagcagatttgaaacactctttttgtggaatttgcatttggagatttcaagcgctttgaggccaaaggcagaaaaggaaatatcttcgtataaaaactagacagaatcattctcagaaactgctctgtgatgtgtgcgttcaactctcagagtttaacttttcttttcattcagcagtttggaaacactctgtttgtaaagtctgcaagtggataatttgaccacttagaggccttcgttggaaacgggtttttttcatgtaaggctagacagaagaattctcagtaacttccttgtgttgtgtgtattcaactcacagagttgaacgatcctttacacagagcagaattgaaacactgtttttgtggaatttacaagtggagatttcagccgctttgaggtcaatggtagaaaaggaaatatcttcctatagaaactagacagaatgattctcagaaactcctttgtgatgtgtgcgttcaactcacagagtttaacctttcttttcatagagcagttaggaaacactctctttgtaaagtctgcaagtggatattcagacatctttgaggctttcgttggaaacgggatttcttcatattctgctagacagaagaattctcagtaacttccttgtgttgtgtgtattcaactcacagagttgaactttcattcacacagagcagatttgaaacactctttttatggaatttgcaagtggagatttcaagcgctttgaggccaaaggcagaaaaggaaatatcttcgtttcaaaactagacagaatcattctcagaaactgctctgcgatgtgtgcgttcaactctcagagtttaacttttcttttcattcagcagtttgaaaacactctgtttgtaaagtctgcacgtggatattttgaccacttagaggtcttcgttggaaacgggtttttttcctgtaaggctagacagaagaattcccagtaacttccttgtgttgtgtacattcaactcacagagttgaacgtttccttagacagagcagatttgaaacactctttttgtgcaattggcaagtggtgatttcagccgctttgaggtcaatggtagaaaaggaaatatcttcgtataaaaactagacagaatcattcccacaaactgcgttgtgatgtgttcgttcaactcacagagtttaacctttcttttcatagagcagttaggaaacagtctgtttgtaaattctttaagtggatattctgacatcttgtgaccttcgttggaaacgggatttcttcatattctgctagacataagaattctcagtaacttccttgtgttctgtgtattcaactcacagagttgaaccatcctttacacagagcagacttgaaacactctttttgtggaatttgcaagtggagatttcagccgctttgaggtcaatggtagaaaaggaaatatcttcgtataaagactagacagaatgattctcataaactcctttgtgatgtgtgcgttcaattcacagagtttaacctttcttttcatagagcagttaggaaacactctgtttgtaaagtctgcaagtggatattcagacatccttgaggccttcgttggaaacgggatttcttcatattctgctagacagaagaattctcagaatcttccttgtgttgtgtgtattcaactcacagagttgaacgatcctttacacagagcagacttgaaacactctttttgtggaatttccaagtggagatttcagccgctttgaggtccatggtagaaaaggaaatatcttcgtataaaaactagacagaatgattctcagaaactcctttgtgatgtgtgcgttcaactcacagagtttaacctttctttccatagagcagttaggaaacactctgtttgtaaagtctgcaagtggatattcagacctccttgaggccttcgttggaaacgggatttcttcatattatgctagacacaagaattcccagtaacttccttgtgatgtgtgtgttcaactcacagagttgaactttcatttacacagagcagatttgaaacactctttttgtggaatttgcaagtggagatttcaagcgctttgaggccaaaggccgaaaaggaaatatcttcgtataaaaactacacagaatcattctcagaaactgctctgtgatgtgtgcgttcaactctcagagtttaacttttcttttcattcagcagtttggaaacactctgtttttaaagtctgcacgtggataatttgaccacttagaggccttcgttggaaacgggatttttcatgtaaggctagacagaagaattcccagtaacttccttgtgttgtgtacattcaactcacagagttgaacgttcccttagacagagcagatttgaaacactctttttgtgcaattggcaagtggtgatttcagccgctttgagatcaatggtagaaaaagaaatatcttcgtataaaaactagacagaatcattcgcacaaactgcgttgtgatgtgttcgttcaactcacagagtttaacctttcttttcatagagcagttaggaaacagtctgtttgtcaattctgtaagtggatattctgacatcttgtggccttcgttggaaacgggatttcttcataatctgctagacagaagaattctcagaatcttccttgtgttgtgtgtattcaactcacacagttgaacgattgtttacacagagcagatttgaaacactctttttgtggaatttgcaagtggagatttcagccgctttgaagtcaaaggtagaaaagggaatatcttcctataaaaactagacagaatgattctcagaaactcctttgtgatgtgtgcgttcacctcacagagtttaacctttctgttcatagagcagttaggaaacactctgtttgtaaagtctgcaagtggatattcagacctctttgaggccttcgttggaaacgggatttcttcatattctgctagacagaagaattctcagtaacttccttgtgttgtgtttattcaactgacagagttgaactttcatttagagagagcagatttgaaacactgtttttgtggaatttgcaagtggagatttcaagcactttggggccaaaggcagaaaaggaaatatcttcgtataaaaactagacagaatcattctcagaaactgctctgcgatgtgtgcattcaactctcagagtttaacttttcttttcattcagcagtttggaaacactctgtttgtaaagtctgcacgtggatattttgaccacttacaggccttcgttggaaacgggtttttttcctgtaaggctagacagaagaattcccagtaacttccttgtgttgtgtgcattcaactcacagagttgaacgttcccttagacagagccgatttgaaacactctatttgtgcaatttgcaagtgtagatttcaagcgctttaaggtcaatggcagaaaaggaaatatcttcgtctcaaaactagacagaatgattcccataaactcctttgtgatgtgtgcgttcaacacacagagtttaacctttctgttcatagagcagttaggaaacactctgtttgtaaagtctgtaagtggatattctgacatcttgtggccttcgctggaaacgggatttcttcatattctgctagacagaagaattctcagtaacttccttgtgttgtgtgtattcaactcacagagttgaacgatcctttacacagagcagacttgaaacacactttttgtggaatttgcaagtggagatttcagccgctttgaggtcaatggtagaaaaggaaatatcttcgtataaagactacacagaatgattctcagaaaatcttttgtgatgtgtgcgttcaactcacagagtttaacttttcttctcatagagcagttaggaaacactctgtttgtaaagtgtgcaagtggatattcagacctctttgaggtcttcgttggaaacgggatttcttcatattatgctagacagaagaattcccagtaacttccttgtgttgtgtgtgttcaactcacagagttaaactttgatttacacagagcagatttgaaacactctttttgtggaatttgcaagtggagatttcaagcgctttgaggccaaaggcagaaaaggagatgtcttcgtataaaaactagacagaatcattctcagaaactgctctgcgatgtgtgcgttcaactctcagagtttaacttttcttttcattcagcagtttggaaacactctgtttgtaaagtctgcacgtggacattttgaccatttagaggccttcgttggaaacgggtttttttcttgtaaggctagacagagaattcccagtaacttccttgtgttgtgtgcattcaactcacagagttgaacgttcccttagacagagcagatttgaaacactctatttgtgcaatttgcaagtgtagatttcaagcgctttaaggtcaatggcagaaaaggaaatatcttcgtttcaaaactagacagaatcattcccacaaactgcgttgtgatgtattcgttcaactcacagagtttaacctttctgttcatagagcagttaggaaacactctgtttgtaaagtctgtaagtggatattctgacatcttgtggccttcgttggaaacgggatttcttcatattctgctagacagaagaattctcagtaacttccttgtgttgtgtgtattcaactcacagagttgaacgatcctttacacagagcagacttgaaacactctttttgtggaatttgcaagtggagatttcagccgctttgaggtcaatggtagaaaaggaaatatcttcgtataagaactagacagaatgattctcagaaactcctttatgatgtgtgcattcaactcacagagtttaacctttcttttcatagagcagttaggaaacactctgtttgtaaagtctgcaagtggatattcagacctctttgaggctttcgttggaaacgggatttcttcatattctgctagacagaagaattctcagaaacttcattgtgttgtgtgtattgaactcaaagagttgaacgatcctttacacagtgcagacttgaaacactctttttgtggaatttgcaagtggagatttcagccgctttgaggtcaatggtagaataggaaatatcttcctataggaactagacagagaatcttctcagaaactgctctgcgatgtgtgcgttcaactctcagagtttaacttttcttttcattcagcagtttggaaacactctgtttgtaaagtctgcacgtggataacttgaccacttagaggccttcgttggaaacgggtttttttcatgtaaggctagacagagaattctcagtaacttccttgtgttgtgtgtattcacctcacagagttgaacgatcctttacacagagcagacttgtaacactctttttgtggaatttgcaagtggagatttcagccgctttcaagtcaaaggtagaaaaggaaatatcttcctataaaaactagacagaataattcccacaaactgcgttgtgatgtgttcgttcaactcacagagtttaacctttgttttcatagaggagttaggaaacagtctgtttgtaaattctgtaagtggatattgtgacatcttgtggccttcgttggaaacgggatttcttcatattctgctatacagaagaattctcagtaacttccttgtgttgagtgtattcaactcacagagttgaacgatcctttacacagagcagacttgaaacactctttttgtggaatttgcaagtggagatttcagccgctttgaggtcaatagtagaaaaggaaatatcttcgtagaaaaactaggcagaatgattctcagaaaatcctttgtgatgtgtgtgttcaactcacagagtttaacttttcttttcatagagcagttaggaaacactctgtttgtaaagtctgcaagtggatattcagacctctttgaggccttcgttggaaacgggatttcttcatattatgctagacagaagaattctcagtaacttccttgtgttgtgtgtattcaactgacacagttgaactttcatttagagagagctgatttgaaacactgtttttgtggaatttgcaagtggagatttcaagcgctttggggccaaaggcagaaaaggaaatatcttcgtataaaaactagacagaatcattctcagaaactgctgcgtgatgtgtgcgttcaactctcagagtttaacttttcttttcattcagcgggttggaaacactctgtttgtaaagtctgcacgaggatattttgaccccttagaggccttcgttggaaacgggtttttttcatgtaaggctagacagaagaattcccagtaacttccttgtgttgtgtgcattcaactcacagagttgaacgttcccctagacagagcagatttgaaacactctatttgtgcaatttgcaagtgtagatttcaagcgctttaaggtcaatggcagaaaaggaaatatcttcgtttcaaaactagacagaatcattcccacaaactgcgttgtgatgtgttcgttcaactcacagagtttaacctttctgttcatagagcagttaggaaacactctgtttgtaaagtctgcaagtgggtattcagacctccttgaggacttcgttggaaacgggatttcttcatattctgctagacagaagaattctcagaatcttcccttgtgttgtgtgtattcaactcacagagttgaacgatggtttacacagagcagatttgaaacactcttttggtggaatttgcaagtggagatttcagccgctttgaggtcaatggtagaaaaggaaatatcttcgtataaaaactagacagagtgattctcagaaacttctttgtgatgtgtgcgttcaactcacagagtttaacctttcttttcatagagcagttaggaaacactctgtttgtaaactctgcaagtggatattcagacctctttgaggccttcgttggaaacgggatttcttcatactatgctagacagaagaattcccagtaacttccttgtgttgtgtgtgttcaactcacagagttgaactttcatttacacagagcagatttgaaacactctttttgtggaatttgcaagtggagatttcaagcgctttgaggccaaaggcagaaaaggaaatatcttcgtataaaaactagacagatcattctcagtaaactgctgcgtgatgtgtgcgttcaagtctcagagtttaacttttcttttcattcagcggtttggaaacactctgtttgtaaagactgcacgtggatattttgaccacttagaggccttcgttggaaacgggttttttttcatgtaaggctagacagaagaattctcagtaacttccttgtgttgtgtgtattcaactcacagtgttgaacgatcctttacaaagagcagacttgaaacactctttttgtgaaatttgcaagtggagatttctgccgctttgaggtcaatggtagaataagaaatatcttcctatagaaactagacagaatgattctcagaaactcctttgtgatgtgtgcgttcaactcacacagtttaacctttcttttcatagagcagttaggaaacactctgtttgtaaagtctgcaagtggatatacagacctctttgaggccttcgttggaaaggggatttcttcatatgatgctagacagaagaattcccagtaacttccttgtgttgtgtgtgttcaactcacagagttgaactttcatttacacagagcagatttgaaacactctttttgtggaatttgcaaatggagatttcatgcgctttgaggccaaaggcagaaaaggaattatcttcgtataaaaactagacagaatcattctcagaaactgctctgcgatgtgtgcattcaactctcagagtttaatttttcttttcattcagcagtttggaaacactctctttgtaaagtctgcacgtggatattttgaccacttagaggccttcgttcgaaacgggttttattcttgtaaggctagacagaagaattcgcagtaacttctttgtgttgtgtacattcaactcacagagttgaacgttcccttagacagagcagatttgaaacactctttttgtgcaattggcaagtggagatttcaagcgctttaaggtcaatggcagaaaaggaaatatcttcgtttcaaaactagacagaatcattcccacaaactgcgttgtgatgtgttcgttcaactcacagagtttaacctttcttttcatagagcagttaggaaacagtctgtttgtcaattctgtaagtggatattctgacatcttgtggccttcgttggaaacgggattttttcatattctgctagacagaggaattctcagtaacttcctttttttgtgtgtattcaactcacagagttgaacgatcctttacacagagcagacttgaaacactctttttgtggaatttgcaagtggagatttcagccgctttgaggtcaatggtagaataggaaatatcatcgtagaaaaactagacagaatgattctcagaaactcctttgtgatgtgtgcgttcaactcacagtgtttaacttttcttttcatagaacagttaggaaacactctgtttgtaaagtctgcaagtggatattcagacctctttgaggccttcgttggaaacgggatttcttcatattctgatagacagaagaattctcagtaacttccttgtgttgtgtgtattcaactcacagatttcaacgatcctttacacagagcagacttgaaacactctttttgtggaatttgcaggtggagatttcagccgctttttgttcaatggtagaataggaaatatcttcctatagaaactagacagaatgattctcagaaactcctttgtgatatgtgcgttcaactcacagagtttaacctttcttttcatagagcagttaggaaacactctgtttgtaaagtctgcaagtggatattcagacctctttgaggctttcgttggaaacgggatttcttcatattctgctagacagaagaattctcagtaacttccttgtgttgtgtgtattcaactcacagagttgaacgatcctttacacagagaagacttgaaacactctttttgtggaatttgcaataggagatttcagccgctttgaggtcaatagtagaaaaggaaacatcttcgtagaaaaactagacagaatgattctcagaaactcctttgggatgtgtgcgttcaactcacagagtttaacctttcttttcatagagcagttaggaaacactcagtttgtaaagtctgcaagtggatattaagacctctttgaggccttcgttggaaacgggatttcttcatattctgctagacagaagaattcccagtaacttccttgtgttgtgtgtgttcaagtcacagagttgaactttcatttacacagagaagatttgaaacactctttttgtggaatttgcaagtggagatttcaagcgctttgaggccaaaggcagaaaaggaaataacttcgtttcaaaactagacagaatcattctcagaaactgctctgcgatgtgtgcgttcaactctcagagtttaacttttcttttcattcagcagtttggaaacactctgtttgtaaagtctacacgtggataacttgaccacttagaggccttcgttggaaacgggtttttttcatgtaaggctagacagaagaattcccagtaacttccttgtgttgtgtacattcaactcacagagttgaacgttaccttagacagagcagatttgaaacactctttttgtgcaattggcaaatggagatttcaagcgctttaaggtcaatggcagaaaaggaaatatcgtcgtttcaaaactagacagaatcattcccacaaactgcattgtgatgtgtttgttcaactcacagagtttaacctttctgttcatagagcagttaggaaacactctgtttgtaaagtctgtaagtggatattctgacatcttgtggccttcgttggaaacgggatttcttcatattctgctagacagaagaattctcagtaacttccttgtgttgtgtgtattcaactcacagagttcaacgatcctttacacagagcagacttgaaacactctttttgtggaatttgcaagtggagatttcagccgctttgtggtcaaaggtagaataggaaatatcttcctatagaaactagacagaatgattctcagaaacttctttgtgatgtgtgcgttcaactcacagagtttaacttttcttttcatagagcagttaggaaacactctgtttgtaaactctgcaagtggatattcagacctctttgaggccttcgctggaaacgggatttcttcatactgtgctagacagaagaattctcagtaacttcattgtgttgtgtgtattcaactcacagatttcaacgatcctttacacagagcagacttgaaacactctttttctggtatttgcaagtggagatttcagccgctttgaggtcaatggtagaaaaggaaatatcttcgtataaaaactagacagagtgattctcagaaactcctttgtgatgtctgcgtttaactcacagagtttaaccattcttttcatagagcagttaggaaacactctgtttgtaaagtgtgcaagtggattttcagacctccttgaggccttcgttggaaacgggatttcttcatattatgctagacagaagaattctcagtaacttccttgtgttgtgtgtattcaactcacagagttgaacgatcctttacacagagcagacttgtaacactctttttgtggaattcgcaagtggagatttcagcagatttgaagtcaaaggtagaaaaggaaatatcttcctataaaaactagacagaatgattctcagaaactcctttgtgatgtgtgtgttcaactcacacagtttaacctttcttttcatagagcagttaggaaacactctgtttgtaaagtctgcaagtggatattcagacctctttgaggccttcgttggaaacgggtttttttcatataaggctagacagaagaattctcagtaacttccttgtgttgtgtgtattcaactcacagagttgaatgatcctttacacagagcagacttgaaacactctttttgtggaatttgcaagtggagatttcagccgctttgtggtcaatggtagaaaaggaaatatcttcgtataaagactagacagaatgattctcagaaactcctttgtgatgtgtgcgttgaactcacagagtttaacctttcttttcatagagcagttaggaaacactctgtttgtaaagtctgcaagtggatattcagacctctttgaggccttcgttggaaacgggtttttttcatataaggctagacagaagaattctcagtaacttccttgtgttgtgtgtattctactcacagagttgaacgatcctttacacagagcagacttgaaacactctttttgtggaatttgcaagtggagattttagccgctttgaggtcaatggtagaaaaagaaatatcttcgtataaagactagacagaatgattctcagaaactcctttgtgatgtgtgtgttcaactcacagagtttaacctttcttttcatagagcagttagtaaacactccgtttataaagtctgcaagtggatattcagacccctttgaggccttcgttggaaacggcatttcttcatattatgctagacagaagaattctcagtatcttccttgtgttgtgtctattcaactcacagagttgaacgatcctttacacagagcagacttgaaacacccttttggtggaatttgcaagtggagatttcagccgctttgaggtcaatggtagaataggaaatatcttcctatagaaactagacagaatgattctcagaaactcctttgtgatgtgtgcattcaactcacagagtttaacctttcttttcatagagcagttaggaaacactctgtttgtaaagtctgcaagtggatattcagacctccttgaggccttcgttggaaacgggatttcctcatattctgctagacagaagaattctcagtaactaccttgtgttgtgtgtattcaactcacagagttgaacgatcctttacagagagcagacttgaaacactctttttgtggaatttgcaagttgagatttcagccgctttgaggtcaatggtagaataggaaatatcttcctatagaaactagacagaatgatactcagaaactcctttgtgatgtgtgcgttcaagtcacagagtttaacctttcttttcatagagcagttaggaaacactctgtttgtaaagtctgcaagtggatattcagacctctttgaggccttcgttggaaacgggtttttttcatataaggctagacagaagaattcccagtaacttccttgtgttgtgtgtgttcaactcacagagttgaactttcatttacacagagcagatttgatacactctttttgtggaatttgcaaatggagatttcaagcgctttgaggccaaaggcagaaaaggaaatatcttcgtataaaaactagacagaatcattctcagaaactgctctgcgatgtgtgcgtttaactctcagagtttaacttttcttttcattcagcagtttggaaacactctgtttgtaaaatctgcacgtggataatttgactacttagaggccttcgttggaaactggtttttttcatgtaaggctagacagaagattctcagtaacttccttgtgttgtgtgtattcaactcacagagttgaacgatcctttacacagagcagacttgaaacactctttttgtggaatttgcaagtggagatttcagccgcgttgaggtcaatggtagaaaaggaaatatcttcgtataaaaactagacagaatgattctcagaaactcctttgtgatgtgtgcgttcaactcacagagtttaacttttcttttcatagagcagttaggaaacactctgtttgtaaagtctgcaagtggatatgtcagacctctttgaggccttcgttggaaacgggatttcttcgtattctgctagacagaagaattctcagtaacttccttgtgttgtgtgtaatcaactgacagagttgaactttcatttagagagagcagatttgtaacactgtttttgtggaatttgcaagtggagatttcaagcgctttggggccaaaggcagaaatggaaatatcttcgtataaaaactagacagaatcattctcagaaactgctctgcgatgtgtgcgttcaactctcagagtttaacttttcttttcattcagcagtttggaaacactctgtttgtaaagtctgcacgtggatattttcaccatttagaggccttcgttggaaacgggtttttttcttgtaaggctagacagaagaattcccagtaacttccttgtgttgtgtacattcaactcacagagttgaacgttcccatagacagagcagatttgaaacactctttttgtgcaattggcaagtggagatttcaagtgctttaaggtcaatggcagaaaaggaaatatcttcgtttcaaaactagacagaatcattcccacaaactgcgttgtgatgtgttcgttcaactcacagagtttaacctttctgttcatagagcagttaggaaacactctgtttgtaaagtctacaagtggatattcagacctccttgaggccttcgttggaaacgggatttcttcatattctgctagacagaagaaatctcagaatcttccttgtgttgtgtgtattcaactcacagagttgaacgatcctttacacagagcagacttgaaacactctttttgtggaatttgcaagtggagatttcagccgctttgaggtccatggtagaaaaggaaatatcttcgtataaaaactagacagaatgattctcagaaactcctttgtgatgtgtacgttcaactcacagagtttaacctttcttttcatagagcagttaggaaacactctgtttgtaaagtctgcaagtggatattgagacctctttgaggcgttcgttggaaacgggttttgttcatataaggctagacagaaagaattctcagtaacttccttgtgttgtgtgtattcaactcacagagttgaacgatcctttacacagagcagacttgtaacactctttttgtggaatttgcaagtggagatttcagccgctttgaagtcaaaggtagaaaaggaaatatcttcctataaaaactacacagtaatgattctcagaaactcctttgtgatgtgtgcgttcaactcacagagtttaacctttcttttcatagagcagttaggaaacactctgcttgtaaagtctgcaagtggatattcagccctctttgaggccttcgttggaaacgggtttttttcatataaggctagacagaagaattctcagtaacttcccttgtgttgtgtgtattcaactgacagagttgaactttcatttagagagagcagatttgaaacactgtttttgtggaatttgcaagtggagatttcaagtgctttggggccaaaggcagaaaacgaaatatcttcgtataaaaagtagacagaatcattctcagaaactgctctgcgatgtgtgcgttcaactctccgagttcaacttttcttttcattcagcagtttggaaacactctgtttgtaaagtctgcacgtggataatttgactacttagaggccttcgttggaaacgggtttttttcatgtaaggctagacacaagaattcccagtaacttccttgtgttgtgtacattcaactcacagagttgaacgttcccttagacagagcagatttgaaacactctttttgtgcaattggcaaatggagatttcaagcgctttaaggtcaatggcagaaaaggaaatatcttcgtttgaaaactagacagaatcattcccacaaactgcgttgtgatgtgttcgttcaactcacagagtttaacctttctgttcatagagcagttaggaaaaactctatttgtaaagtctgtaagtggatattctgacatcttgtggccttcgttggaaacgggatttcttcatattctgctagacagaagaattctcacaatcttccttgtgttgtgtgtattcaactcacagagttgaacgatggtttacacagagcagatttgaaacactctttttgtggaatttgcaagtggagatttcagccgctttgaggtcaatggtagaaaaggaaatatcttcgtataaaaactagacagaatgattctgagaaactactttgtgatgtgtgcgttcaactcacagagtttaacttttcttttcatagagcagttaggaaacactctgtttgtaaagcctgcaagtggatattcagacctccttgaggccttcgttggaaacgggatttcttcatattatgctagacagaagaattctcactaacttccttgtgttgtgtgtattcaactcacagagttgaacgatcctttacacagagcagactttaaacactctttttgtggaatttgcaagtggagatttcagccgctttgaggtcaacggtagaaaaggaaatatctccgtataaagactagacagaatgattctcagaaactcctttgtgatgtgtgcgttcaactcacagagtttaacttttcttttcatagagcagttaggaaacactccgtttgtaaagtctgcaagtggatattcagacctctttgaggccttcgttggaaacgggatttcttcatattatgctagacagaagaattcccagtaacttccttgtgttgtgtgtgttcaactcacagagttgaactttcatttacacagagcagatttgaaacactctttttgtggaatttgcaaatggagatttcaagagctttgaggccaaaggcagaaaaggaaatatcttcgtataaaaactagacagaatcattctcagaaactgctctgcgatgtgtgcgttcaactctcagagtttaactttgcttttcattcagcagtttggaaacactctgtttgtaaagtctgcacgtggataatttgaccacttagaggccttccttggaaacgggtttttttcatgtaaggctagacagaagaattctcagtaacttccttgtgctgtgtgtattcaactcacagagttgaacgatcctttacacagagtggacttgaaacactctttttgtggaatttgcaagtggagatttcagccgcgttgaggtcaatggtagaaaaggaaatatcttcgtataaaaactagacagaatgattctcagaaactcctttgtgatgtgtgcgctcaactcacagagtttaaactttcttttcatagagcagttaggaaacactctgtttgtaaagtctgcaagcggatattcagacctctttgaagccttcgttggaaacgggatttcttcatattctgctagacagaagaattcccagtaacttccttgtgttgtgtgtgttcaactcacagagttgaacgatcctttacacagagcagatttgaaacactctttttgtggaatttgcaagtggagatttcaagcgctttgaggccaaaggcagaaaaggaaatatcttcgtagaaaaactagacagaatgattctcagaaccttctttgtgatgtgtgcgttcaactcacagagtttaaactttcttttcatagagcagttaggaaacactctgtttgtaaactctgcaagtggatattcagacctctttgaggccttcgttggaaacgggatttcttcatactatgctagacagaagaattctcagaaacttccttgtgttgtgtgtattcaactcacagagtttaacgatcgtttacacagagcagacttgagacactctttttgtggaatttgtaagtggagatttcagccgctttggggtcaatggtagaaaaggaaatatcttcatgtaaaaactagacagaatcattctcagaaactgctctgtgatgtgtgcgttcaactctcagagtttaacttttctgttcattcagcagtttggaaacactctgtttgtaaagtctgcacgtggataatttgaccacttagaggccttcgttggaaacgggtttttttcatataaggctagacagaagaattctcagtaactttcttgtgttgtgtgtattcaactgacagagttgaactatcatttagagagtgcagatttgaaacactgtttttgtggaatttgtaagtggagacttcaagcgctttggggccaaaggcagaaaaggaaatatcttcgtataaaaactagacagaatcattctcagaaactgctctgcgatgtgtgcgttcaactctcagagtttaagttttcttttcattcagcagtttggaaacactctgtttgtaaagtctgcacgtggataatttgaccacttagaggccttcattggaaacgggtttttttcatgtaaggctagacagaataattctcagtaacttccttgtgttgtgtgtattcaactcacagagttgaacgatcctttacagagagcagacttgaaacactctttttgtggaatttgcaagtggagatttcagccgctttgaggtcaatggtagaaaacgaaatatcttcgtataaagactagacagaatgattctgagaaactcctttgtgatgtgtgcgttcaactcacagagtttaacctttcttttcatagagcagttaggaaacactctctttgtaaagtatgcaagtggatattcagacatccttgaagctttcgttggaaacgggatttcttcatattctgctagaaagaagaattctcagtaacttccttgtgttgtgtgtattcaactcacagagttgaatgatcctttacacagaacagtcttgaaacagtctttttgtggaatttgcaagtggagatttcagccgctttgaggtcaatggtggaataggaaatatcttcctatagaaactagacagaatcattgtcagaaactgctctgtgatgtgtgcgttcaactctcagagtttaacttttcttttcattcagtagtttggaaacactctgtttgtaaagtctgcacgtggatattttgaccacttagaggccttcgatggaaacggggttttttcatttaaggctagacagaagaattcccagtaacttccttgtgttgtgtgcattcaactcacagagatgaacgttcccttagacagagcagatttgaaacactctatttgtgcaatttgcaagtgtagatttcaagggctttaaggtcaatggcagaaaaggaaatatcttcgtttcaaaactagacagaatcattcccacaaactgcgttgtgatgtgttcgttcaactcacagagtttaacctttcttttcatagagcagttaggaaacagtctgtttgtcaattctgtaagtggatattctgatatcttgtggccttcgttggaaacgggatttcttcatattctgctagacagaagaattctcagaatcttccttgtgttgtgcgtattcaactcacagagttgaacgatcctttacacagagcagacttgaaacactctttttgtggaatttgcaagtggagatttcagccgctttgaggtccatggtagaaaaggaaatatcttcgtataaaaactagacagaatgattctcagaaactcctttgtgatgtgtgcgttcaacacacagagtttaacctttcttttcatagagcagttaggaaacactctgtttgtaaagtctgcaagtggatattcagacctccttgaggccttcgttggaaacgggatttcttcatattatgctagacagaagaattctcagtaacttccttttattgtgtgtattcaactcacagagttgaacgatcctttacacagagcagatttgaaacactctttttgtggaatttgcaagtggagatttcagccgctttgaggtcaatggtagaaaaggaaatatcttcgtataaaaattagacagaatgattctcagaaactcctttgtgatgtgtgcgttcaactcacagagtttaacctttcttttcatagagcagttaggaaacactctgtttgtaaagtctgcaagtggatattcagacctctttgaggctttcgttggaaactggatttcttcatattctgctagacagaagaattctcagtaacttccttgtgttgtgtgtattcaactcacagagttgaaagatcctttacagagagcagacttgaaacactctttttgtggaatttgcaagtggagatttcagccgctttgaagtcaatggtagaaaaggaaatatcttcgtataaagactagagagaatgattctcagaaactcctttgtgatgtgtgtgttcaactcacagagtttaacctttcttttcatagagcagttagtaaacactctgtttataaagtctgcaattggatattcagacccctttgaggccttcgttggaaacgggatttcttcatattatgctagacagaagaattcccactaactttccttgtgttgtgtgtgttcaactcacagagttgaactttcatttacacagagcagatttgaaacactctttttgtggaatttgcaagtggagatttcaagcgctgtgaggccaaaggcagaaaaggaagtatgcttcgtataaaaactagacagaatcattctaagaaactgctctgcgatgtgtgtgttcaactctcagagtttaacttttcttttccttcagcagtttggaaacactctgtttgtaaagtctgcacgtggataatttgaccacttagaggccttcgttggaaacgggtttttttcatgtaaggctagacagaagaattcccagtaacttccttgtgttgtgtgcattcaactcacagagttgaacgttcccttagacagagcagatttgaaacactctatttgtgcaatttgcaagtgtagatttcaagcgctttaaggtcaatggcagaaaaggaaatatcttcgtttcaaaactaggcagaatgattctcagaaactcctttgtgatgtgtgcgttcaactcacagagtttaacctttcttttcatagagcagttaggaaacactctgtttgtaaagtctgcaagtggatattcagacctccttgaggcctccgttggaaacgggatttcttaatattctgctagacagaagaattctcagtaacttccttgcgttgtgtgtattcaactcacagagttgaacgatcctttacacagagcagacttgaaacactctttttgtggaatttgcaaggggagatttcagccgctttgaggtcaatagtagaaaaggaaatatcttcgtatagaaactagacagaatgattctcagaaactcctttgtgatgtgtgcgttcaactcacagagtttaacctttcttttcatagagcagttacgaaacactgtgtttttaaactctgcaagtggatattcagacctctttgaggccttcgttggaaacgggtttcttcatactgtgctagacagaagaattctcagaatcttccttgtgttgtgtgtattcaactcacagagttgaacgatcgtttacacagagcagatttgaaacactcatttggtggaatttgcaagtggagatttcagccgctttgaggtcaatggtagaaaaggaaatatcttcgtataacaactagacagaatgattctcagaaactcctttgtgatgtgtgcgttcaactcacagagtttaacctttcttttcatagagcagttaggaaacactctgtttgtaaagtctgcaagtggatgttcagacctctttgaggccttcgttggaaaggggtttttttcatataaggctagacagaataattctcagtaagttccttgttttgtgtgtattcaactcacagagttgaaggatcctttacacagagcaggcttgaaacactctttttgtcgaaattgcaagtggagatttcagccgctttgaggtcaatggtagaataggaaatatcttcctatagaaactagacagaatgattctcagaaacttctttgtgatgtgtgcgttcaactcacagagtttaaacctttcttttcatagagcagttaggaaacactctgtttgtaaactctgcaagtggatattcagacctctttgaggccttctttgcaaacgggatttcttcatactatgctagacagaagaattgtcagtaactttccttgtgttgtgtgtattcaactcacagagttgaatgatcctttacacagagcagacttgaaacactctttatgtggaatttgcaagtggagatttcagccgctttgagttcaatggtagaataggaaatatcttcctatagaaactagacagaatgattctcagaaactcctttgtgatgtgtgcgttcaactcacagagtttaacctttcttttcatagagcagttaggaaacactccgtttgtaaagtctgcaagtggatattcagacctcttagaggccttcgatggaaacgggatttcttcatattctgctagacagaagaattctcagtaacttccttgtgttgtgtgtattgaactcacagagttgaacgatccttttcagagagcagacttgaaacactctttttgtggaatttgcaagtggagatttcagccgctttgaggtcaatggtagaaaaggaaatatcttcgtataaagactagacagaatgattctcagaaactcctttgtgatgtgtgtgtccaactcacagagtttaacctttcttttcatagagcagttaggaaacactctgtttgtaaagtctgcaagaggatattcagacctctttgaggccttcgttggaaacgggttttttccatataaggctagacagaagatttctcagaaacttcgttgtgttgtgtgttttcaaatcacagagttcaacgatcctttacacagagtagacttgaaacactctttttgtggaattggcagtgtggagatttcagccgcttttaggtcaatggtagaaaaggaaatatcttcgtataaaaactagacagaatcattctcagaaactgctgcgtgatgtgttcgttcaactctcagagtttaacttttcttttcattcagcggtttggaaacactctgtttgtaaagtctgcacgtggatattttgaccacttagaggtcttcgttggaaacgggtttttttcatgtaaggctagacagaagaattctcagtaactgccttgtgttgtgtgtattcaactcacagagttgaacgatcctgtacacagagcagacttgaaacactccttttgtggaatttgcaagtggagatttcagccgctttgaggtcaatggtagaataggaaatatcttcctatagaaactagacagaatgattctcagaaactcctttgtgatgtgtgcgttcaactcacagagtttaaccgttcttttcatagagcagttaggaaacactctgtttgtaaagtctgcaagtggatattcagacatctttgaggctttctttggaaacgggatttcttcatattctgctagacagaagaattctcagaaacttccttgtgttgtgtgtattcaactcacagagttgaacgatcctttactcagagcagacttgaaacactccttttgtggaatttgcaagtggagattccagccgctttgaggtcaatggtagaataggaaatatcttcctatggaaactagacagaaatcattctcagaaaactgctctgcgatgtgtgcgttcaactctcagagtttaacttttcttttcattcagcagtttggaaacactctgtttgtaaagtctgcacgtggatattttgaccacttagaggccttcgttggaaacgggtttttttcctgtaaggctagacagaagaattcccagtaacttccttgtgttgtgtacattcaactcacagagttgaacgttcccttagacagagcagatttgaaacactctttttgtgcaattggcaaatggagatttcaagcgctttaagttcaatggcagaaaaggaaatatcttcgtttcaaaactagacagaatcattcccacaaactgcgttgtgatgtgttcgttcaactcacagagtttaacctttctgttcatagagcagttaggaaacactctgtttgtaaagtctgtcagtggatattctgacatcttgtggccttcgttggaaacgggatttcttcatattctgctagacagaagaattctcagtaacttccttgtgttgtgtgtattcaactcacagagttgaacgatcctttacacagagcagacttgtaacactctttttgtggaatttgcaagtggagatttcagccgctttgaggtccatggtagaaaaggaaatatcttcctataaaaactagacagaatgattctcagaaacttctttgtgatgtgtgcgttcaactcacagagtttaacctttcttttcatagagcagttaggaaacactctgtttgtaaactctgcaagtggatattcagacctctttgaggccttcgttggaaacgggatttcttcattctatgctagacagaagaattctcagtaactttccttgtgttgtgtgtattcaactcacagagttgaacgatcctttacacagagcagacttgaaacactctttttctggaatttgcaagcggagatttcagctgcgttgaggtcaatggtagaaaaggaaatatcttcgtataaaaactagacagaatgattctcagaaactcctttgtgatgtgtgcgttcaactcacagagtttaacctttcttttcatagagcagttaggaaacactctgtttgtaaagtctgcaagtggatattcagacctctttgaggccttcgttggaaacgggtttttttcatatacggctagacagaagaattctcagtaacttccttgtgttgtgtgtattcagctgacagagttgaactttcatttagagagagcagatttgaaacactgtttttgtggaatttgcaattggagatttcaagcgctttggggccaaaggcagaaaaggaaatatcttcgtaaaaaactagacagaatgtttctcagaaacttctttgtgatgtgtgcattcaactcacagagtttaacctttcttttcatagagcagttaggaaacactgtgtttgtaaagtctgcaagtggatattcagacctctttgaggccttcgttggaaacgggatttcttcatactgtgctagacagaagaattctcagtaacttccttgtgttgtgtgtattcaactcacagagttgaacgatcctttacacagagcggacaggaaacactctttttctggaatttgcaagcggagatttcagctgcgttgaggtcaatggtagaaaaggaaatatcttcgtataaaaactagacagaatgattctcaggaaactcctttgtgatgtgtgtgttcaactcacagagtttaacctttcttttcatagagcagttaggaatcactctgtttgtaaagtctgcaagtggatattcagacctctttgaggccttcgttggaaacgggtttttttcatataaggctagacagaagaattctcaataacttccttctgttgtgtgtattcaactgacagagttgaactttcatttagagagagcagatttgaaacactgtttttgtggaatttgcaagtggagatttcaagcgctttggggccaaaggaagaaaaggaaatatcttcgtataaaaactagacagaatcattctcagaaactgcagcgtgatgtgtgcgttcaactctcagagtttaacttttcttttcattcagcggtttggaaacactctgtttgtaaagtctgcacgtggatattttgaccacttagaggccttcgttggaaacgggtttttttcatgtaaggctagacagaagaattcccagtaacttccttgtgttgtgtgcattcaactcacagagttgaacgttcccttagacagagcagatttgaaacactctatttgtgcaatttgcaagtgtagatttcaagcgctataaggtcaacggcagaaaaggaaatatcttcgtttcaaaactagacagaatcattcccacaaactgcgttgtgatgtgttcgttcaactcacagagtttaacctttcttttcatagagcagttaggaaacagtctgtttgtaaattctgtaagtggatattctgacatcttgtggccttcgttggaaacgggatttcttcatattctgctaggcagaagaattctcagtaacttccttgtgttgtgtttattcaactcacagagttgaatgatcctttacacagagcagacttgaaacactctttttgtggaatttgcaagtggagatttcaaccgctttgaggtcaatggtagaaaagtaaatatcttcgtataaagactagacagaatgattctcagaaacttctttgtgatgtgtgcgttcaactcacagagtttaacctttcttttcatagagcagttaggaaaccctctgtttgtaaactctgcaagtggatattcagacctgtttgaggccttcgttggaaacgggatttcttcatactatgctagacagaagaattcccagtaacttccttgtgttgtgtgtgttcaactcacagaggtgaactttcatttacacagagcagatttgaaacactctttttgtggaatttgcaagtggagatttcaagcgctttgaggccaaaggcagaaaaggaaatatcttcgtataaaaactagacagaatcattctcagaaactgctctgcgatgtgtgcgttcaactctcagagtttaacttttcttttcattcagcagtttggaaacactctgtttgtaaagtctacacgtggataatttgaccacttagaggccttcgttggaaacgggtttttttcatgtaaggctagacagaagaattctcagtaacttccttgtgttgtgtgtattcaactcacagaggtgaacgatcctttacacagagcagacttgtaacactctttttgtggaatttgcaagtggagatttcagccgctttgaagtcaaaggtagaaaaggaaataacttcctataaaaactagacagaatgattctcataaactcctttgtgatgtgtgcgttcaactcacagagtttaacctttcttttcatagagcagttaggaaacactctgtttgtaaagtctgcaagtggatattcagacccctttgagtccttcgttggaaacgggatttcttcatattctgctagacagaagaattcccagtaacttccttgtgttgtgtgtgttcaactcacagagttgaactttcatttacacagagcagattggaaacactctttttgtggaatttgcaagtggagatttcaagcgctttgaggccaaaggcagaaaaggaaatatctttgtataaaaactagacagaatcattctcagaaactgctctgcgatgtgtgcgttcaactctcagagtttaacttttcttttccttcagcagtttggaaacactctgtttgtaaagtctgcacgtggataacttgaccacttagaggccttcgttggaaacgggtttttttcatgtaaggctagacagaagaattctcagtaacttccttgtgttgtgtgtattcaactcacagagttgaacgatcctttacacagagcagacttgaaacactctttttgtggaatttgcaagtggagatttcagccgctttgaggtcaatggtagaaaaggaaactttcttcgtataaagactagacagaatgattctcataaactcctttgtgatgtgtgcgttcaactcacagagtttaacctttcttttcatagagcagttaggaaacactctgtttgtaaagtctgcaagtggatattcagacatccttgaggccttcgttggaaacgggatttcttcatattctgctagacagaagaattcccagtaacttccttgtgttgtatgtgttcaactcacagagttgaactttcatttacacagagcagatttgaaacactctttttgtggaatttgcaaatggagatttcaagcgctttgaggccaaagacagaaaaggaaatatcttcgtataaaaactagacagaatcattctcagtaaactgctgcgtgatgtgtgcgttcaactctcagagtttaacttttcttttcattcagcggtttggaaacactctgtttgtaaagtctgcacgtggatattttgaccacttagaggccttcgttggaaacgggttttttgcatgtaaggctagacagaagaattcccagtaacttccttgtgttgtgtacattcaactcacagagttgaacgttcccttagacagagcagatttgaaacactctttttgtgcaattggcaaatggagatttcaagcgctttatgttcaatggcagaaaaggaaatatcttcgtttcaaaactagacagaatcattcccacaaactgcgttgtgatgtgttcgttcaactcacagagtttaacctttctgttcatagagcagttaggaaacactctgtttgtaaagtctgtaagtggatattctgacatcttctggccttcgatggaaacgggatttcttcatattctcctagacagaagattctcagaatcttccttgtgttgtgtgtattcaactcacagagttgaacgatcctttacacagagcagacttgaaacactctttttgtggaatttgcaagtggagatttcagccgctttgaggtccatggtagaaaaggaaatatcttcgtataaaaactagacagaatgattctcagaaaatcttttgtgatgtgtgccttcaactcacagagtttaacttttcttctcatagagcagttaggaaacactctgtttgtaaagtctgcaagtggatattcagacctctttgaggtcttcgttggaaacgggatttcttcatattatgctagacagaagaatcctcagtaacttccttgtgttgtgtgtattcaactcacagagttgaacgatcctttacacagagcagacttgaaacactctttttgtggaatttgcaagtggagatttcagccgctttgaggtcaatagtagaaaaggaaatatcttcgtagaaaaactagacagaatgattctcagaaactcctttgtgatgtgtgcgttcaactcacagagtttaacctttctttccatagagcagttaggaaacactctgtttgtaaagtctgcaagtggatattcagacctctttgaggccttcgttggaaacgggttttttccatataaggctagacagaagaattcccagtaacttccttgtgttgtgtgtgttccactcacagagttgaactttcgtttacacagagcagatttgaaacactctttttgtggaatttgcaaatggagatttcaagcgctttgaggccaaaagcagaaaaggaaatatcttcgtataaaaactagacagaatcattctcagaaactgctgcgtgatgtgtgcgttcaactctcagagtttaacttttcttttcattcagcgatttggaaaaactctgtttgtaaagactgcacgtggatattttgaccacttagaggccttcgttggaaacgggttttttttcatgtaaggctagacagaagaattctcagtaacttccttgtgttgtgtgtattcaactcacagagttgaacgatcctttaaacagagcagacttgaaacactctttttgtggaatttgcaattggagatttcagccgctttgaggtcaatagtagaaaaggaaatatcttcgtagaaaaactagacagaatgattctcagaaactcctttgaaatgtgtgcgttcaactcacagagtttaacctttcttttcatagagcagttaggaaacactctgtttgtaaagtctgcaagtggatattcagacctccttgaggccttcgttggaaacgggatttcttcatattatgctagacagaagaattcccagtaacttccttgtgttgtgtgtgttcaactcacagagttgaactttcacttacacagagcagatttgaaacactctttttgtggaatttgcaaatggagatttcaagcgctttgaggccaaaggcagaaaaggaaatatcttcgtataaaaactagacagaatcattctcagaaactgctctgtgatatgtccgttcaactctcagagtttaacttttcttttcattcagcagtttggaaacactctgtttgtaaagtctgcacgtggataatttgaccacttagaggccttcgttggaaacgggtttttttcatgtaaggctagacagaataattctcagtaacttccttgtgttgtgtgtattcaactcacagagttgaaggatcctttacagagagcaggcttgaaacactctttttgtcgaatttgcaagtggagatttcagccgctttgaggtcaatggtagaataggaaatatctttttatagaaactagacagaatgattctcagaaactcctttgtgatgtgtgcgttcaactcacagagtttaacctttcttttcatagagcagttaggaaacactctgtttctaaagtctgcaagtggatattcagacctgtttgaggccttcgttggaaacgggtttttttcatataaggctagagagaagaattcccagtaacttccttgtgttgtgtgtgttcaactcacagagttgaactttccttcacacagagcagatttgaaacactctttttgtggaatttgcaagtggagatttcaagcgctttgaggccaaaggcagaaaaggaaatatcttcgtataaaaactagacagaattattctcagaaactgctctgcgatgtgtgcgttcaactctcagagtttaacttttcttttcattcagcagtttggaaacactctgtttgtaaagtctgcacgtggatattttgaccacttagaggcctttgttggaaacgggttttttcctgtaaggctagacagaagaattcccagtaacttccttgtgttgtgtacattcaactcacagagttgaacgttcccttagacagagcagatttgaaacactctttttgtgcaactggcaagtggagatttcaagcgctttaaggtcaatggcagaaaaggaaatatcttcgtttcaaaactagacagaatcattcccacaaactgcgttgtgatgtgttcgttcaactcacagagtttaacttttctgttcatagagcagttaggaaacactctgtttgtaaagtctgtaagtggatattctgacatcttgtggccttcgttggaaacgggatttcttcatattctgctagacagaagaattctcagaatcttccttgtgttgtgtgtattcaactcacagagttgaacgatggtttacagagagcagatttgaaacactctttttgtggaatttgcaagtggagatttcagctgctttgaggtcaatggtagaaaaggaaatatcttcgtataaaaactagacagaatgattctcagaaactcctttgtgatgtgtgcgttcaactcacaggagtttaacctttcttttcatagagcagttaggaaacactctgtttgtaaagtctgcaagtggatattcagacctccttgaggccttcgttggaaacgggatttcttcctattatgctagacagaagaattctcagtaacttccttgtgttgtgtgtattcaactcacagatttgaacgatcctttacacagagcagacttgaaacactcttgttgtggaatttgcaagtggagatttcagccgctttgaggtcaatggtagaaaaggaaatatcttcctatagaaattagacagaatgattctcagaaactcctctgtgatgtgtgcgttcaactcacagagtttaacctttcttttcatagagcagttaggaaacactctgtttgtaaagtctgcaagtggatattcagacatctttgaggctttctttggaaaagggatttcttcatattctgctatacagaagaattctcagtaacttccttgtgttgtgtgtattcaagtgacagagttgaactttcatttacagagagcagatttgaaacactgtttttgtggaatttgcaagtggagatttcaagcgctttggggccaaaggcagaaaaggaaatatcttcgtataaaaactagacagaatcattctcagaaactgctgcgtgatgtgtgcgttcaactctcagagtttaacttttcttttcattcagcggtttggaaacactctgtttgtaaagtctgcacgtggaaattgtgaccacttagaggccttcgttggaaacgggtttttttcatgtaaggctagacagaagaattcccagtaacttccttgtgttgtgtgcattcaactcacagagttgaacgttcccttagacagagcagatttgaaacactctatttgtgcaatttgcaagtgtagttttcaagctctttaaggtcaacggcagaaaaggaaatatcttggtttcaaaactagacagaatcattcccacaaactgcgttgtgatgtgttcgttcaactcacagagtttaacctttctgttcatagagcagttaggaaacactctgtttgtaaagtctgtaagtggatattcagacatcttgtggccttcgttggaaacgggatttcttcatattctgctagacagaagaattctcagtaacttccttgtgttgtgtgtattcaactcacagagttgaacgatcctttacacagaggagacttgaaacactctttttgtggaatttgcaagtggagatttcagccgctttgaggtcaatggtagaaaaggaaaaatcttcgtatagaaacaagacagaatgattctcagaaactcctttgagatgtgtgtgttcaactcacagagtttaacctttgttttcatagaggagttaggaaacactctgtttgtaaagtctgcaagtggatattcagacctctttgaggccttcgttggaaacgggtttttttcatataaggctagacagaagaattctcagtaacttccttgtcttgtgtgtattcaactcacagagttgaacgatcctctacacagagcagacttgtaacactctttttgtggaatttgcaagtggagatttcagccgctttgaagtcaaaggtagaaaaggaaatatcttcctataaaaactagacagaatgattctcagaaactcctttgtgatgtgtgcgttcaactcacagagtttaacctttcttttcatagagcagttaggaaacactctgtttgtaaagtctgcaagtggatattcagacatccttgaggctttcgttggaaacgggatttcttcatattctgttagaaagaagaattctcagtaacttccttgtgttgtgtgtattcaactgacagagttgaactttcatttagagagagcagatttgaaacactgtttttgtggaatttgcaagtggagatttcaagcgctttggggccaaaggcagaaaaggaaatatctccgtataaaaactagacagaatcattctcagaaactgctctgtgatgtgtgcgttcaactctcagagtttaacatttcttttcattcagcagtttggaaacactctgtttgtaaagtctgcacgtggataatttgaccacttagaggccttcgttggaaacgggtttttttcatgtaaggctagacagaagaattctcagaaacttccttgtgttgtgtgtattcaactcacagagttgaacgatcgtttacacggagcagacttgagacactctttttgtggaatttgcaagtggagatttcagccgctttgagttcaatggtagaataggaaatatcttcatataaaaactagacagaatgattctcagaaactcctttctgatgtgtgcgttcaactcacagagtttaaactttcttttcatagagcagttaggaaacactctgtttgtaaagtctgcaagtggatattcagacctctttgaggccttcgttggaaacgggatttcttcatattatgctagacagaagaattctcagaaaattccttgtgttgtgtgtattcaactcacagagttgaacgatcctttacagagagcagacttgaaacactctttttgtggaatttgcaagtggagatttcagccgctttgaggtcaatggtagaataggaaatatcttcctatagaaacttgacagaatgattctcagaaactactttgtgatgtgtacgttcaactcacagagtttaacctttgttttcatagagcagttaggaaacactctgtttgtaaagtctgcaagtggatattcagacctctttgaggccttcgttggaaacgggtttttttcatataaggctagacagacgaattctcagtaacttccttgtgttgtgtgtattcaactcacagagttgaacgatcctttacacagagcagacttgaaacactctttttgtggaatttgcaagtggagatttcagccgctttgaggtcaatggtagaataggaaatatcttcctatagaaactagacagaatgattctcagaaactcctttgtgctgtgtgcgttcaactcacagagtttaacctttcttttcatagagcagttaggaaactctctgtttgtaaagtctgcaagtggatattcagacatctttgaggctttcgttggaaacgggatttcttcatattctgctagacagaagaattctcagtaactttccttgtgttgtgtgtattcaactcacagagttgaacgatcctttacacagagcggacaggaaacactctttttctggaatttgcaagcggagatttcagctgcgttgaggtcaatggtagaaaaggaaatatcttcgtataaaaactagacagaatgattctcagaaactcctttgtgatgtgtgcgttcaactcacagagtttaacctttcttttcatagagcagttagggaacactctgtttgtaaagtctgcaagtggatattcagaccgctttgaggccttcgttggaaaggggatttcttcatattctgctagacagaagaattctcagtaacttcattgtgttgtgtgtattcaactcacagatttcaacgatcctttacacagagcagacttgaaacactctttttgtggaatttgcaagtggagatttcagcctctttgaggtcaatggtagaataggaaatatcttcctatagaaaccagacagaatgattctcataaactcctttgtgatgtgtgcgttcaactcacagagtttaacctttcttttcatagagcagttaggaaacactctgtttgtaaagtctgcaagtggatattcagacctgcttgaggccttctttggaaaagggatttctgcatattatgctagacagaaggaattctcagtaacttccttgtgttgtgtgtattcaactgacagagttgaactttcatttagagagagcagatttgaaacactgtttttgtggaagttgcaagtggagatttcaagcgctttggggccaaaggcagaaaaggaaatatcttcgtataaaaactagacagaatgattctcacaaactcctttgtgatgtgtgtgttcaactcacagagtttaacctttcttttcatagagcagttagtaaacactctgtttataaagtctgcaagtggatattcagacctccttgaggccttcgttggaaacgggatttcttcatattatgctagacagaagaattcccagtaacttccttgtgttgtgtgcattcaactcacagagttgaacgttcccttagacagagcagatttgaaacactctatttgtgcaatttgcaagtgtagttttcaagctctttaaggtcaacggcagaaaaggaaatatcttcgtttcaaaactagacagaatgattctcagaaactcctttgtgatgtgtgcgttcaactcacagagtttaacctttcttttcatagagcagttaggaaacactctgtttgtaaagtctgcaaatggatattccgacctccttgagggcttcgttggaaacgggatttcttcatattctgctatacagaagaattctcagaaacttcattgtgttgtgtgttttcaactcacagagttcaacgatcctttacacagagtagatttgaaacactctttttgtggaattggcagggtggagatttcagccgctttgcggtcaatggtagaaaaggaaatatcttcgtataaaaactagacagaatgattctcagaaactcctttgtgatgtgtgcgttcaactcacagagtttaacctttcttttcatagagcagttgggaaacactctgtttgtaaagtctgcaagtggatattcagacatccttgaggctttcgttggaaatgggatttcttcatattctgctagaaagaataattctcagtaacttccttttgttgtgtgtattcaactcacagagctgaacgatcctttacagagagcagactttaaacactctttttgtggaatttgcaagtggagatttcagccgctttgaggtcaatgttagaataggaaataacttcctatagaaactagacagaatgattctcagaaactcctttgtgatgtgtgcgttcaactcacagagtttaacttttcttttcatagagcagttaggaaacactgtgtttgtaaagtctgcaagtggatattcagacctctttgaggccttcgttggaaacgggatttcttcatattatgctagacagaagaattctcagtaaattccttgtgttgtgtgtattcaactcacagagttgaacgatcctttacacagagcagacttgaaacactctttttgtggaatttgcaagtggagatttcagccgctttgaggtcaatggtagaataggaaatatcttcctatagaaaatagacagaatgattctcagaaactcctttgtgatgtgtgtgttcaactcacagagtttaacctttcttttcatagagcagttaagaaacactctgtttgtaaagtctgcaagtggatattcagacctccttgaggccttcgttggaaacgggatttcttcatattctgctagacagaagaattcccagtaacttccttgtgttgtgtgtgttcaactcacagagttgaactttcatttacacagagcagatttgaaacactctttttgtggaatttgcaagtggggatttcaagcgctgtgaggccaaaggcagaaaaggaaatatcttcttataaaaactagacagaatcattctcagaaactgctgcgtgatgtgtgcgttcaactctcagagtttaacttttcttttcattcagcggtttggaaacactctgtttgtaaagtctgcacgtggaaattttgaccacttagaggccttcgttggaaacgggattttttcatgtaaggctagacagaagaattcccagtaacttccttgtgttgtgtgcattcaactcacagagttgaacgttcccttagacagagcagatttgaaacactctatttgtgcaatttgcaagtgtagttttcaagctctttaaggtcaacggcagaaaaggaaatatcttcgtttcaaaactagacagaatcattcccacaaactgcgttgtgatgtgttcgttcaactcacagagtttaacctttctgttcatagagcagttaggaaacactctgtttgtaaagtctgtaagtggatattctgacatcttgtggccttcgttggaaacgggatttgttcatattctgctagacagaagaagtctcagtaacttccttgtgttttgtgtattcaactcacagagttgaacgatcctttacacagagcagacttgaaacactctttttgtggaatttgcaactggagatttcagccgctttgaggtcaatggtagaataggaaatatcttcctatagaaactagacagaatgattctcagaaactcctttgtgatgtgtgcgttcaactcacagagtttaacctttcttttcatagagcagttaggaaacactctgtttgtaaagtctgcaagtggatatttagacatctttgtggatttcgttggaaacgggatttcttcatattctgctatacagaagaattctcagaaacttccttgtgttgtgtgtattcaactcacagagttcaacgatagtttacacagagcagacttgaaacactctttttgtgtaatttgcaagtggagatttcagccgcttcgaggtcaatggtagaaaaggaaatatcttcgtataaaaactagacagaatcattctcagaaactgctctgcgatgtgtgcgttcaactctcagagtttaacatttcttttcatttagcagtttggaaacactctgtttgcaaagtctgcacgtggataatttgaccacttagaggccttcgttggaaacgggtttttttcatgtaaggctagacagaagaattcccagtaacttccttgttttgtgtacattcaactcacagagttgaacgttcccttagacagagcagatttgaaacactctttttgtgcaattggcaaatggagatttcaagcgctttaaggtcaatggcagaaaaggaaatatcttcgtttcaaaactagacagaatcattcccacaaactgcgttgtgatgtgttcgttcaactcacagagtttaacctttctgttcatagagcagttaggaaacactctgtttgtaaagtctgtaagtggatattctgacatcttgtggccttcgttggaaacgggatttcttcctattctgctagacagaagaattctcagtaacttccctgtgttgtgtgtattcaactcacagagttgaacgatcctttacagagagcagacttgaaacactctttttgtggaatttgcaagtggagatttcagccgctttgaggtcaatggtagaataggaaatatcttcccatagaaactagacagaatgattcccacaaaatcctttgtgatgtgtgcgttcaactcacagagtttaacctttcttttcatagagcagttagtaaacactctgtttataaagtctgcaagtggatattcagacccctttgaggccttcgttggaaacgggatttcttcatattatgctagacagaagaattctcagtaacttccttctgttgtatgtattcaactgacagagttgaactttcatttagagagagcagatttgaaacactgtttttgtggaatttgcaagtggagatttcaagcgcttcggggccaaaggcagaaaaggaaatatcttcgtataaaaactagacagagaatcattctcagaaactgctctgcgatgtgtgcgttcaactctcagagtttaacttttcttttcattcagcagtttggaaacactctggttgtaaagtctgcacgtggataacttgaccacttagaggccttcgttggaaacgggtttttttcctgtaaggctagacagaagaattcccagtaacttccttgtgttgtgtgcattcaactcacagagttgaacgttcccttagacagagcagatttgaaacactctatttgtgcaatttgcaagtgtagatttcaagcgctttaaggtcaatggcagaaaaggaaatatcatcgtttcaaaactagacagaatcattgccacaaactgcgttgtgatgtgttcgttcaactcacagagtttaacctttctgttcatagagcagttaggaaacactctgtttgtaaagtctgtaagtggatattctgacatcttgtagccttctttggaaacgggatttcttcatattctgctagacagaagaattctcagtaacttccttgtgttgtgtgtattcaactcacagagttgaacgatcctttacacagagcagacttgaaacactctttgtgtggaatttgcaagtggagatttcagccgctttgaggtcaatggtagaataggaaatatcttcgtataaagactagacagaatgattctcagaaactcctttgtgatgtgtgcgttcaactcacagagtttaacttttcttttcatagagcagttaggaaacactctttttgcaaagtctgcaagtggatattcagacctctttgaggccttcgttggaaacgggatttcttcatattatgctagacagaagaattcccagtaacttccttgtgttgtgtgtgttcaactcacagagttgaactttcatttacacagagcagatttgaaacactctttttgtggaatttgcaagtggagatttccagcgctttgaggccaaaggcagaaaaggaaatatcttcgtttcaaaactagacagaatcattctcagaaactgctgcgtgatgtgtgcgttcaactctcagagtttaacttttcttttcattcagcggtttggaaacactctgtttgtaaagtatgcacgtggatattttgaccacttagaggccttcgttggaaacgggttttttgcatgtaaggctagacagaagaattcccagtaacttccttgtgttgtgtgtgttcaactcacagagttgaacgttcccttagacagagcagatttgaaacactctatttgtgcaattggcaagtggtgatttcagccgctttggggtcaatggtagaaaaggaaatatcttcgaataaaaactagacagaatcattcccacaaactgcgttgtgatgtgttcgttcaactcacagagtttaacctttgtgttcatagagcagttaggaaacactctgtttgtcaagtctgtaagtggatattctgacatcttgtggccttcgttggaaacgggatttcttcatattctgctagacagaagaattctcagtaacttccttgtgttgtgtgtattcaactcacagagttgaatgatcctttacacagagcagacttgaaacactctttttgtggaatttggaagtggagatttcagccgctttgagttcaatggtagaataggaaatatcttcctatagaaactagacagaaatgattctcagaaactcctttgtgatgtgtgcgttcaactcacagagtttaacctttgttttcatagagcagttaggaaacactctgtttgtaaagtctgcaagtggatattcagacctccttgaggccttcgttggaaacgggatttcttcatattatgctagacagaagaactcccagtaacttccttgtgttgtgtgtgttcaactcacagagttgaactttcatttacacagagcagatttgaaacactctttttgtggaatttgcaagtggagatttcaagcgcgttgaggccaaaggcagaaaaggaaatatcttcgtttaaaaactagacagaatgattctcagaaactcctttgtgatgtgtgcgttgaactcacagagtttaacctttcttttcatggagcagttaggaaacactctgtttgtaaagtctgcacgtggatacttggacttctttgaggccttcgttggaaacgggtttttttcatgtaaggttaaacagaagaattcccagtaacttccttgtgttgtgtgcattcaactcacagagttgaacgtaccttagacagagcagatttgaaacactctatttgtgcaatttgcaagtgtagatttcaagcgctttaaggtcaatggcagaaaaggaaatatcttcgtttcaaaactagacagaatgattctcagaaacttcattgtgacgtgtgctttcaactcacagagtttaacctttcttttcatagaggagttaggaaacactctgtttgtaaagtctgcaagtggatattcagacctctttgaggccttcgttggaaacgggatttcttcatactgtgctagacagaagaattctcagtaacttccttgtgttgtgtgtattcaactcacagagttgaacgatcctttacacagagcggactttaaacacactttttgtggaatttgcaagtggagatttcagccgcattgaggtcaatggtagaaaaggaaatatcttcgtataaaaactagacagaatgattctcagaaacttctttgtgatgtgtgcgttcaactcacagagtttaacctttcttttcatagagcagttaggaaacactccgtttgtaaagtctgcaagtggatattcagacctctttgaggccttcgttggaaacgggatttcttcatactatgctagacagaagaattcccagtaacttccttgtgttgtgtgtgttcaactcacagagttgaactttcatttacacagagcagatttgaaacactctttttgtggaatttgtaaatggagatttcaagcgctttgaggccaaaggcagaaaaggaaatatcttcgtataaaaactagacagaatcattctcagaaactgctctgtgatgtgtgcgttcaactctcagagtttaacttttcttttcattcagcagtttggaaacactctgtttgtaaagtctccacgtggatatttggacttgtttgaggccttcgttggaaaagtgtttttttcatgtaaggctagacagtagaattcccagtaacttccttgcgttgtgtacattcaactcacagagttgaacgttcccttagacagagcagatttgaaacactctttttgtgcaattggcaagtggagatttcaagcgctttaaggtcaatggcagaaaaggaaatatcttcgtttcaaaactagacagaatcattcccacaaactgcgttgtgatgtgttcgctcaactcacagagtttaacctttctgttcatagagcagttaggaaacactctgtttgtaaagtctgtaagtggatattctgacatcttgtggccttcgttggaaacgggatttcttcctattctgctagacagaagaattctcagtaacttccttgtgttgtgagtattcaactcacagagttgaacgatcctttacacagagcggacttgaaacactcgttttgtggaatttgcaagtggagatttcagccgctttgaggtcaatggtagaaaaggaaatatcttcgtataaaaactagacagaattattctcagaaactcctttgtgatgtgtgcgttcaactcacagagttcaacctttcttttcatagagcagttgggaaacactctgtttgtaaagtctgcaagtggatattcagacttctttgaggccttcgttggaagcgggatttcttcatattctgctagacagagtaattctcagtaacttccttgtgttgtgtgtattcaactgacagagttgaactttcatttagagagagcagatttgaaacactgtttttgtggaatttgcaagtggagatttcaagcgctttcgggccaaaggcagaaaaggaaatatcttcgtataaaaactagacagaatcattctcagaaactgctctgcgatgtgtgcgttcaactctcagagttcaacttttcttttcattcagcagtttggaaacactctgtttgtaaagtctgcacgtggataatttgaccacttagagaccttcgttggaaacgggtttttttcatgtaaggctagacagaagaattcccactaacttccttgtgttgtgtgcattcaactcacagagttgaacgttcccttagacagagcagatttgaaacagcctatttgtgcaatttgcaagtgtagatttcaagcgctttaaggtcaacggctgaaaaggaaatatcttcctttcaaaactagacagaatcattcccacaaactgcgttgtgatgtcttcgttcaactcacagagtttaacctttcttttcatagagcagttaggaaacagtctgtttgtaaattctgtaagtggatattctgacatcttgtggccttcgttggaaacgggatttcttcatattctgctagacagaagaattctcagtaacttccttgtgttgtgtgtattcaactcacagagttgaactatcctttacacagagcagacttgaaccaaactttttgtggaatttgcaagtggagatttcagccgctttgaggtcaatggtagaataggaattatcttcctatagaaactagacagaatgattctcagaaactcctttgtgatgtgtgcgttcaactcatagagtttatcctttcttttcatagagcagttaggaaacactctgtttgtaaagtctgcaagtggatattcagacatccttgaggctttcgttggaaacgggatttcttcatattctgctagaaagaagaattctcagcaacttccttgtgttgtgtgtattcaactcacagagttgaacgatcctttacacagagcagacttgaaacactctttttgtggaatttgcaagtggagatttcagccgctttgaggtcaatggtagaataggaaatatcttcctaaagaaactagacagaatgattctcagaaactcctttgtgatgtgtgcgttcaactcacagagtttaacctttcttttcatagagcagttaggaaacactctgtttgtaaagtctgcaagtggatattcagacctccttgaggccttcgttggaaacgggatttcttcatattctgctagaaaaaagaattctcagtaacttccttgtgttgtgtttattcaaatcacagagttgaatgatcctttacacagagcagacttgaaacactctttttgtggaatttgcaagtggagatttcagccgctttgtggtcaatggtagaaaaggaaatatcttcgtataaagactagacagaatgattctcagaaactcctttgtgatgtgtgcgttcaactcacagtgtttaacctttcttttcatagagcagttgggaaacactctgtttgtaaagtctgcaagtggatattcaaacttctttgaggccttcgttggaagcgggatttcttcatattctgctagacggaagaattctcagtaacttccttgtgttgtgtgtattcaactctcagagttgaacgatcctttacagagagcagacttgaaacactctttttgtggaatttgcaagtggagatttcagccgctttgaggtcaatggtagaataggaaatatcttcctatagaaactagacagaatgattctcagaaactcctttgtgatgtgtgcgttcaactcacagagtttaccctttcttttcatagagcagttgggaaacactctgtttgtaaagtctgcaagtggatattcagacctccttgaggctttcgttggaaacgggatttcttcatattctgctagaaagaataattctcagtaacttccttgtgttgtgtgtattcaactcacagagttgaacgatcctttacagagagcagacttgaaacactctttttgttgaatttgcaagtggagatttcagccgctttgaggtcaatggtagaaaaggaaactatcttcgtataaagactagacagaatgattctcagaaactcctttgtgatgtgtgcgttcaactcacagagtttaacctttcttttcatagagcagttgggaaacactctgtttgtaaagtctgcaagtggatattcagacattcttgaggctttcgttggaaacgggatttcttcatattctgctagaaagaagaattatcagtaacttccttgtgttgtgtgtattcaactcacagagttgaacgatcctttacacagagcagtcttgaaacactcttgttgtggaatttgcaagtggagatttcagccgctttgaggtcaatggtagaaaaggaaatatcttcgtataaaaactagacagaatgattctcagaaactcctttgtgatgtgtgcagttcaacacacagagtttaacctttcttttcatagagcagttagggaacactctgtttgtaaagtctgcaagtggatattcagacctctttgaggccgtcgttggaaacgggatttcttcatattatgctagacagaagaattctcagtaacttccttgtgttgtgcgtattcaactcacagagttgaacgatcctttacacagagcagacttgaaacactctttttgcggaatttgcaactggagatttcagccgctttgaggtcaatggtagaataggaaatatcttcctatagaaattagacagaatgattctcagaaactcgtttgtgatgtgtgcgttcaactcacagagtttaacctttcttttcatagagcagttaggaaacactctgtttgtaaagtctgcaagtggatattcagtcctctttgaggccttcgttggaaacggggttttttcatataaggctagacagaagaattctcagtaactttccttgtgttgtgtgtattcaactcacacagttgaacgatcctttacacagagcagacttgtaacactctttttgtggaatttgaaagtggagatttcagccgctttgaagtcaaaggtagaaaaggaaatatcttcctataaaaactagacagaatgattctcagaaactcctttgtgatgtgtgtgttcaacgcacagagtttaacctttcttttcatagagcagttagtaaacactctgtttataaagtctgcaagtggatattcagacccctttgaggccttcgttggaaacgggatttcttcatattatgctagacagaagaattctcagtaacttcctcgtgttgtgtgtattcaactcacagagttgaatgatcctttacacagagcagacttgaaacactctttttgtggaatttgcaaatggagatttcagccgctttgaggtcaatggttgaaaaggaaatatcttcaaataaaaactagacagaatgattctcagaaactcctttgtgatgtgtgcgttcaactcacagagtttaacctttcttttcatagagcagttaggaaacactctgcttgtaaagtctgcaagtggatattcagccctctttgaggccttcgttggaaacgggtttttttcatataaggctagacgagaagaattcccagtaacttcccttgtgttgtgtgtgttcaactcacagagttgaactttcatttacacagagcagatttgaaacactctttttgtggaatttgcaagtggagatttcaagcgctttgaggccaaaggcagaaaaggaaatatcttcgtataaaaacttgacagaatcattctcagaaactgctctgcgatgtgtgcgttcaactctcagagtttaacttttcttttcattcagcagtttggaaacactctgtttgtaacgtctacacgtgaataatttgaccacttagaggccttcgttggaaacgggtttctttcatgtaaggctagacagaagaattcccagtaacttccttgtgttgtgtgcattcaactcacagagttgaacgttccctagacggagcagatttgaaacactctatttgtgcaatttgcaagtgtagatttcaagcgctttaaggtcaatggcagaaaagggaatatcttcgtttcaaaactagacagaatgattctcagaaactcctttgtgatgtgtgcgttcaactcacagagtttaacctttctgttcatagagctgttaggaaacactctgtttgtaaagtctgcaagtggatattcagatctccttgaggccttcgttggaaacgggatttcttcatattctgctagacagaagaattctcagtaacttccttgtgttgtgtgtattcaactcacagagttgaatgatcctttacacagaacagtcttgaaacactctttttctggaatttgcaagtggagatttcagccgctttgaggtcaatggtagaataggaaatatcttcctatagaaactagacagaatgattctcagaaactcctttgtgatgtgtgcgttcaactcacagagtttaacctttcttttcatagagcagttaggaaacaatctgtttgtaaagtctgcaagtggatattcagacatctttgaggctttcgttggaaacgggatttcttcatattctgctagacagcagaattctcagtaacttccttgtgttgtgtgtattcaactcacagagttgaacgaacctttacacagagcagacttgaaacactctttttgtggaatttgcaaggggagatttcagccgctttgaggtcaatagtagaaaaggaaatatcttcatatagaaactagacataatgattctcagaaactcctttgtgatgtgtgcgttcaactcacagagtttaacctttcttttcatagagcagttaggaaacactctgtttgtaaagtctgcaagtggatattcagacctccttggggccttcgttggaaacgggatttcttcatattatgctagacagaagaattctcagtaacttccttgtgttgtgtgtattcaactcacagagttgaacgatcctttacacagagccgacttgaaacactctttttgtggaatttgcaagtggagatttcagccgctttgaggtcaatggtagaaaaggaaatatcttcgtataaagactagacagaatgattctcagaaactcctttgtgatgtgtgcgttcaactcacagagtttaacctttcttttcatagagcagttaggaaacactctgtttgtaaagtctgcaagtggatattcagacctccttgaggccttccatggaagcgggatttcttcatgttcagctagacagaagaattctcagtaacttccttgtgttgtgtgtattcaactcacagagttgaacgatcctttacacagagcagacttgaaacactctttgtggaatttgcaattggagatttcagccgcgttgaggtcaatggtagaaaaggaaatatcttcgtataaaaactagacagaatgattctcagaaactcctttgtgatgtgtgtgttcaactcacagagtttaacctttcttttcatagagcagttaggaaacactctgtttgtaaagtctgcaagtggatattcagacctcctagaggccttcgttggaaacgggatttcttcatattctgctagtcagaagaattctcagtaacttccttgtgttgtgtgtattcaactcacagagttgaatgatccttgacacagagcagacttgaaacactctttttgtggaatttgcaagtggagatttcagccgctttgaggtcaatggtagaaaaggaaatatcttcatataaaaattagacagaaggattctcagaaactcctttgtgatgtgtgcgttcaactcacagagtttaacctttcttttaatagagcagttaggaaacactctgtttgtaaagtctgcaagtggatattcagacctctttgaggccttcgttggaaacgggtttttttcatataaggctggacagaagaattcccagtaacttccttgtgttgtgtgcattcaactcacagagttgaacgttcccttagacagagcagatttgaaacactctatttgtgcaatttgcaagtgtagatttcaagcactataaggtcaatggcagaaaaggaaatatcttcgtttcaaaactagacagaatcattcccacaaactgcgttgtgatgtgttcgttcaactcacagagtttaaccattctattcatagagcagttaggaaacactctgtttgtaaagtctgtaagtggatattctgacatcttgtggccttcgttggaaacgggatttcttcatattctgctagacagaagaattctcagcaacttccttgtgttgtgtgtattcaactcacagagttgaacgatcctttacacagagcagaattgaaacactgtttttgtggaatttgcaagtggagatttctgccgctttgaggtcaatggcagaaaaggaaatatcttcctatagaaactagacagaatgattctcagaaactcctttgtgatgtgtgcgttcaactcacagagtttaacctttcttttcatagagcagttaggaaacactctgtttgtaaagtctgcaagtggatatttagacctctctgaggccttcgttggaaacgggatttcttcatattctgctagacagaagaattcccagtaacttccttgtgttgtgtgtgttcaactcacagagttgaaatttcatttaaacagagcagatttgaaacactctttttgtggaatttgcaagtggagatttcaagcgctttgaggccaaaggcagaaaaggaaatatcttcctataaaaactagacagaatcatgatcagaaactgctctgcgatgtgtgcgttcaactctcagagtttaacttttcttttcattcagcagtttggaaacactctgtttgtaaagtctgcacgtggataatttgaccacttagaggccttcgttggaaacaggtttttttcatgtaaggctagacagaagaattcccagtaacttccttgtgttgcgtacattcaactcacaaagttgaacgttcccttagacagagcagatttgaaacactctttttgtgcaattggcaagtggagatttcaagcgctttaaggtcaatggcagaaaaggaaatatcttcgtttcaaaactagacagaatcattcccacaaactgcgttgtgatgtgttcgttcaactcacagagtttaaactttcttttcatagagcagttaggaaacagtctgtttgtaaattctgtacgtggatattctgacatcttgtggccttcgttggaaacgggatttcttcatattctgctagacagaagaattctcagtaacttccttgtgttgtgtgtattcaactcacagagttgaacgatcgtttacacagagcagacttgaaacactctttttgtggaatttgcaagtggagatttcagccgctttgaggtcaatggtagaaaaggaattatcttcgtataaaaactagacagaatggttctcagaaactcctttgtgatgtgtgcgtttaactcacagagtttaacctttcttttcatagagcagttaggaaacactctgtttgtaaagtctacaagtggatattcagacctctttgaggccttcgttggaaacgggtttttttcatataaggctagacagaagaattctcagtaacttccttgtgttgtgtgtattcaactcacagagttgaacgatcctttacacagagcagacttgaaacactctttttgtggaatttgcaagtggagatttcagccgctttgaggtcaatggtagaaaagtaaatatcttcgtataaaaactagacagaatgattctcagaaactcctttgtgatgtgtgcgttcaactcacagagtttaaccattcttttcatagagcagttaggaaacactctgtttgtaaagtctgcaagtggatattcagacctccttgaggccttcgttggaaacgggatttcttcctattatgctagacagaagaattctcagtaacttccttgtgttgtgtgtattcaactcacagagttgaacgatcctttacacagagcagagttgaaacactctttttgtggaatttgcaagtggagatttcagccgctttgaggtcaatagcagaaaaggaaatatcttcgtagaaaaactagacagaatgattctcagaaactcctttgtgatgtgtgcgttcaactcaaagagtttaacctttcttttcgtagagcagttaggaaacactctctttgtaaagtctgcaagtggatattcagacctctttgaggcctacgttggaaacgggatttcttcatattatgatagacagaagaattctcagaaacttccttgtgttgtgtgcattcaactcacagagttgaacgatcctttacacagagcagattagaaacattctttttgtggaatttgcaagcggagatttcagccgctttgaggtccatggtagaaaaggaaatatcttcgtataaaaactagacagaatgattctcagaaacttcattgtgatgtgtgcgttcaactcacagagtttaacctttcttttcatagagcagttaggaaacactctgtttgtaaactctgcaagtggatattcagacctctttgaggccttctttggaaacgggatttcttcatactgtgctagacagaagaattctcagtaacttccttgtgttgtgtgtattcacctcacagagttgaacgatcctttacacagagcagacttgaaacactctttttgtggaatttgcaagtggagatttcagccgctttgaggtcaatggtagaataggaaatatcttcctatagaaactagacagaacgattctcagaaactcctttgtgatgtgtgcgttcaactcacagagtttaacctttcttttcatagagcagttaggaaacactctgtttgtaaaggctgcaagtggatattcagacctctttgaggccttcgttggaaacgggatttcttcctattctgctagacagaagaattctcagtaacttccttgtgttgtgtgtattgaactcacagagttgaacgatcctttacacagagcagacttgaaacactctttttgtggaatttgcaagtggagatttcagccgctttgaggtcaatagtagaaaaggaaatatcttcgtataaagactagacagaatgattctgagaaactcctttgtgatgtgtgcgttcaactcacacactttaacctttcttttcatagagcaattaggaaacactctgtttgtaaagtctgcaagtggatattcagacctctttgaggccttcgttggaagcgggatttcttcatattctgctagacagaagaattcccagtaacttccttgtgttgtgtgtgttcaactcacagagttgaactttcatttacacagagcagatttgaaacactctttttgtggaatttgcaaatggagatttcaagcgctttgaggaaaaaggcagaaaaggaaatgtcttcgtttcaaaactagacagaatgattctcagaaactcctttgtgatgtgtgcgttcaactcacagagtttaacttttcttttcatagagcagttaggaaacactctgtttgtaaagtctgcaagtggatattcagacctccttgaggccttctttggaaacgggatttcttcatattctgctagacagaagaattctcactaacttccttgtgttgtgtgtattcaactcacagagttgaacgatcctttacaaagagcagacttgaaacactctttttgtagaatttgcaagtgtagatttcagccgctttgaggtcaatggtagaaaaggaaatatcttcgtataaagactagacagaatgattctcagaaactcctttgtgatgtgtgcgttcaactcacagagtttaacttttcttttcatagagcagttaggaaacactctgtttgtaaagtctgcaagtggatattcagacctccttgaggccttcgttggaaacaggatttcttcatattctgctagacggaagaattctcagtaaattccttgtgttgtgtgtattcaactcacagagttgaacgatcctttacaaagagcagacttgaaacactctttttgtggaatttgcaagtggagatttcagccgctttgaggtcagtagtagaaaaggaaatatcttcgtagaaaaactagacagaaatgattctcagaaactcctttgtgatgtgtgtgttcaactcacagagtttaacctttcttttcatagagcagttaggaaacactctgtttctaaagtctgcaagtggatattcagacctctttgaggccttcgttggaaacgggtttttttcatataaggctagacagaagaattccctgtaacttccttgtgttgtgtgtattcaactgacagagttgaactttcatttagacagagcagatttgaaacactctttttgtggaatttacaagtggagatttcaagcgctttgaggccaaaggcagaaaaggaaatatcttcgtataaaaactagacagaatcattctcagaaactcctttgtgatgtgtgcgttcaactctcagagtttaacttttcttttcattcagcggtttggaaacactctgtttgtaaagtctgcacgtggaaattttgaccacttagaggccttcgttggaaacgggtttttttcatgtaaggctagacagaagaattcccagtaacttccttgtgttgtgtgcattcaactcacagagttgaacgttcccttagacagagcagatttgaaacactctatttgtgcaatttccaagtgtagatttcaagcgctttaaggtcaatggcagaaaaggaaatatcttcgtttcaaaactagacagaatcattcccacaaactgcgttgtgatgtgttcgttcatctcacagagtttaacctttcttttcatagagcagttaggaaacagtctgtttgtaaattctgtaagtggatattctgacatcttgtggccttcgttggaaacgggatttcttcatattctgctagacagaagaattctcagtaacttccttgtgttgtgtgtattcaactcacagagttgaacgatcctttacacagagcagacttgaaacactctttttgtggaatttgcaagtggagatttcagccgctttgaggtcaatagtagaaaaggaaatattttcgtagaaaaactagacagaatgattctcagaaactcctttgtgatgtgtgcgttccactcacagagtttaacctttcttttcatagagcagttaggaaacactctgtttgtaaagtctgcacctggatatttggacttctttgaggccttcgttggaaacgggtttttttcatgaaaggctagacagaagaattcccagtaacttccttgtgttgtgtgtgttcaactcacagagttgaactttcatttacacagagcagatttgaaacactctttttgtggaatttgcaaatggagatttcaagcgctttgaggaaaaaggcagaaaagggaatatcttcgtataaaaactagacagaatcattctcagaaagtgctctgcgatgtgtgcgttcaactctcagagtttaacttttcttttcattcagcagtttggaaacactctgtttgtaaagtctgcacgtggataatttgaccacttagaggccttcgttggaaacgggtttttttcatgtaaggctagacagaagaattcccagtaacttccttgcgttgtgtacattcaactcacagagttgaacgttcccttagacagagcagatttgaaacactctttttgtgcaattggcaagtggagatttcaagcgctttaaggtcaatggcagaaaaggaaatatcttcgtttcaaaactagacagaatcattcccacaaactgcgttgtgatgtgttcgttcaactcacagagtttaacctttcttttcatagagtagttaggaaacagtctgtttgtaaattctgtacgtggatattctgacatcttgtggccttcgttggaaacgggatttcttcatgttctgctagacagaagaattctgagaatcttccttgtgttgtgtgtattcaactcacagagttgaacgatggtttacacagagcagatttgaaacactctttttgtggaatttgcaagtggagatttcagccgctttgaggtcaatggtagaaaaggaaatatcttcgtataaaaactagacagaatgattctcataaactcctttgtgatgtgtgcgttcaaatcacagagtttaacttttcttttcatagagcagttaggaaacactctgtttgtaaagtctgcaagtggatattcagacctctttgaggccttcgttggaaacgggatttctacatattatgctagacagaagaattcccagtaacttccttgtgttgtgtgtgttcaactcacagagttgaactttcatttacacagagcagatttgaaacactctttttgtggaatttgcaagtggagatttcaagcgctttgaggccaaaggcagaaaaggaaatatcttcgtataaaaactagagagaatcattctcagaaactgctctgtgatgtgtgcgttcaactctccgagtttaacttttcttttcattcagcagtttggaaacactctgtttgtaaagtctgcacgtggataatttgaccacttagaggccttgtttggaaacggattttttttcatgtaaggctagacagaagaattcccagtaacttccttgtgttgtgtacattcaactcacagagttgaacgttcccttagacagagcagatttgaaacactctttttgtgcaattggcaagtggtgatttcagccgctttgaggtcaatggtagaaaaggaaatatcttcgtataaaaactagacagaatcattcccacaaactgcgttgtgatgcgttcgttcaactcacagagtttaacctttctgttcatagagcagttaggaaacactctgtttgtaaagtctgtaagtggatattctgacatcttgtggccttcgttggaaacgggatttcttcatattctgctagacagaagaattctcagaatcttccttcagttgtgtgtattcaacacacagagttgaacgatggtttacacagagcagatctgaaacactttttgtggaatttggaagtggagatttcagctgctttgaggtcaatggcagaaaaggaaatatcttcgtataaaaactagacagaatgattctcagaaactcctttgtgatgtgtgcgttcaactcacagagtttaacctttcttttcatagagcagttaggaaacactctgtttgtacagtctgcaagtggatattctgacctccttgaggccttcgttggaaaagggatttcttcatattctgctagacagaagaattcccagtaacttccttgtgttgtgtgtgttcaactcacagagttgaactttcatttacacagagcagatttgaaacactctttttgtggaatttgcaagtggagatttcaagcgctttgaggccaaaggcagaaaaggaaatatcttcgtataaaaactagacacaatcattctcagaaactgctctgtgatgtgtgcgttcaactctcagagtttaacttttcttttcattcagcagtttggaaacactctgtttgtaaagtctgcacgtggataatttgaccacttagaggccttcgttggaaacgggtttttttcatgtaaggctagacagaagaattcccagtaacttccttgtgttgtgtacattcaactcacagagttgaacgttcccgtagacagagcagatttgaaacactctttttgtgcaattggcaagtggagatttcaagcgctttaaggtcaatggcagaaaaggaaatatcttcgtttcaaaactagacagaatcattcccacaaactgcgttgtgatgtgttcgttcaactcacagagtttaacctttctgttcatagagcagttaggaaacactctgtttgtaaggtctgcaagtggatattcagacctcctagaggccttcgttggaaacgggatttcttcatattctgctagacagaagaattcccagtaacttccttgtgttgtgtgtgttcaactcacagagttgaactttcatttacacagagcagatttgaaacactctttttgtggaatttgcaagtggagatttcagctgctttgaggtccatggtagaaaaggaaatatcttcgtataaaaactagacagaatgattctgagaaactcctttctgatgtgtgcgttcaactcacagagtttaacctttcttttcatagagcagttaggaaacactctgttggtaaagtctgcaagtggatattcagacctccttgaggccttcgttggaaacgggatttcttcatattatgctagacagaagaattctcagtaacttccttgtgttgtgtgtattcaactgacagagttgaactttcatttagagagagcagatttgaaacactgtttttgtggaatttgcaagtggagatttcaagcgctttggggccaaaggcagaaaaggaaatatcttcatataaaaactagacagaatcattctcagaaactgctctgtgatgtgtgcgttcaactctcagagtttaacttttctcttcattcagcagtttggaaacactctgtttgtaaagtctgcacgtggataatttgaccacttagaggccttcgttggaaacgggtttttttcatgtaaggctagacagaagaattcccagtaacttccttgtgttgtgtacattcaactcacagagttgaacgttcccttagacagagcagatttgaaacactctttttgtgcaattggcaagtggtgatttcagccgctttgaggtcaatggtagaaaaggaaatatcttcgtataaaaactagacagaatgattctcagaaacttcactgtgacgtgtgcgttcaactcacagagtttaacctttcttttcatagagcagttaggaaacactctgtttgtaaactctgcaagtggatattcagacctctttgaggccttcgttggaaacgggatttcttcatactgtgctagacagaagaattctcagtaacttccttgtgttgtgtgtattcaactcactgagttgaacgatcctttacacagaacatactagaaacactcttcttgtggaatttgcaagtggagatttcagccgctttgaggtcaatggtagaataggaaatatcttcgtataaaaattagatagaatgattctcagaaactcctttgtgatgtgtgtgttcaactcacacagtttaacctttcttttcatagagcagttagtaaacactctgtttataaagtctgcaagtggatattcagacccctttgaggccttcgttggaaacggggtttcttcatattctgctagacagaagaattcccagtaacttccttgtgttgtgtgtgttcaactcacagagttgaactttcatttagacagagcagatttgaaacactctttttgtggaatttgcaaatggagatttcaagcgctttgaggccaaaggcagaaaaggaaatatcttcgtataaaaactagacagaatcattctcagaaactgctctgcgatgtgtgcgttcaactctcagagtttaactttgcttttcattcagcagtttggaaacactctgtttgtaaagtctgcacgtggataatttgaccacttagaggccttcgttggaaacgggtttttttcatgtaaggctagacagaagaattcccagtaacttctatgtgttgtgtgcattcaactcacagagatgaatgttcccttagacagagcagatttgaaacactctatttgtgcaatttgcaagtgtagatttcaagcgctttaaggtcaatggcagaaaaggaaatatcttcgtttcaaaactagacagaataattcccacaaactgcgttgtgatgtgttcgttcaactcacagagtttaacctttcttttcatagagcagttaggaaacactctgttggtaaattctgtaagtggatattctgacatcttgtggccttcgttggaaacgggatttcttcatattctgctagacagaagaattctcagtaacttccttgtgttgtgtgtattcaactcacagagttgaacgatcctttacagagagcagacttgaaacagtctttttgtggaatttgcaaatggagatttcagccgctttgaggtcaatggtagaaaaggaaatatcttcgtataaagactagacagaatgattctcagaaactcctttgtgatgtgtgcagttcaactcacagagtttaacctttcttttcatagagcagttaggaaacactctgtttgtaaagtctccaagtggatattcagacctctttgaggccttcgttggaaacgggtttttttcatataaggctagacagaagaattctcagtaacttccttgtcttgtgtgtattcaactcacagagttgaacgatactttacacagagcagacttgaaacccaccttttgtggaatttgcaagtggagatttcagccgctttgaggtcaatggtagaatacgaaatatcttcctatagaaactagacagaatgattctcagaaactcctttgtgatgtgtgcgttcaactcacagagtttaacctttcttttcatagagcagttaggaaacactctgtttgtaaagtctgcaagtggatattcagagctccttgaggccttcgttggaaatgggatttcttcatattatgctagacagaagaattctcagtaacttccttgtgttgtgtgtattcaactgacagagttgaactttcatttagagagagcagatttgaaacactgtttttgtggaatttgcaagtggagatttcaagcgctttggggccaaaggcagaaaaggaaatatcttcgtataaatactagacagaatcattctcagaaactgctgcgtgatgtgtgcgttcaactctcagagtttaacttttcttttcattcagcggttttggaaacactctgtttgtaaagtctgcacgtggaaattttgaccacttagaggccttcgttggaaacgggtttttttcatgtaaggctagacagaagaattcccagtaacttccttgtgttgtgtacattcaactcacagagttgaacgttcccttagacagagcagatttgaaacactttttttgtgcaattggcaagtggagatttcaagcgctttaaggtcaatggcagaaaaggaaatatcttcgtttcaaaactagacagaatcattcccacaaactgcgttgtgatgtgttcgttcaactcacagagtttaacctttccgttcatagaccagttaggaaacactctgtttgtaaagtctgtaagtggatattctgacatcttgtggccttcgttggaaacgggatttcttcatattctgctagacagaagaattctcagaaacttccttgtgttgtgtgttttcaactcacagagttcaacgatcctttacacagaggagacttgaaacactctttttgtggaatttgcaagtggagatttcagccgctttgaggtcaatggtagaataggaaatatcttcctatagaaactagacagaatgattctcagaaacttctttgtgatgtgtgtgttcaactcacagagtttaacctttcttttcatagagcagttaggaaacactctgtttgtaaactctgcaagtggatactcagacctctttgaggccttcgttggaaacgggatttcttcatactatgctagacagaagaattctcagtaacttcccttgtgttgtgtgtattcaactgacagagttgaactttcatttagagagagcagatttgaaacactgtttttgtggaatttgcaagtggagatttcaagcgctttggggccaaaggcacaaaaggaaatatcttcgtataaaaactagacagaatcattttcagaaactgcactgcgatgtgtgcgttcaactctcagagtttaacttttcttttcattcagcagtttggaaacactctgtttgtaaagtctgcacgtggataatttgaccacttagaggccttcgttggaaacgggtttttttcatgtaaggctagacagaagaattctcagtaacttccttgtgttgtgtgtattcaactcacagagttgaacgatcctttacacagagcagacttgaaagactctttttgtggaatttgcaagtggagatttcagccgctttgaggtcaatagtagaaaaggaaatatcttcgtagaaaaactagacagaatgattctcagaaactcctttgtgatgtgtgtgttcaactcacagagtttaacctttcttttcatagagcagttaggaaacactctgtttgtaaagtctgcaagtggataatcagacctctttgaggccttcgttggaaacgggatttcttcatattatgctagacagaagaattcccagtaacttccttgtgttgtgtgtgttcaactcacagagttgaactttcatttacacagagcagattggaaacactctttttgtggaatttgcaagtggagatttcaagcggtttgaggccaaaggcagaaaaggaaatatcttcgtataaaaactagacagaatcattctcagaaactgctctgcgatgtgtgcgttcaactctcagagtttaacttttcttttcattcagcagtttggaaacactctgtttgtaaagtctgcacgtggatattttgaccacttagaggccttcgttggaaacgggtttctttcctgtaaggctagacagaagaattcccagtaacttccttgtgttgtgtgcattcaactcacagagttgaacgttcccttagacagagcagatttgaaacactctatttgtgcaatttgcaagtgtagatttcaagcgcattaaggtcaatggcagaaaaggaaatatcttcgtttcaaaattagacagaatcattcccacaaactgcgttgtgatgtgttcgttcatctcacagagtttaacctttcttttcatagagcagttaggaaacagtctgtttgtaaattctgtaagtggatattctgagcatcttgtgcccttcattggaaacgggatttcttcatgttctgctagacagaagaattctcagtaacttccttgtgttgtgtgtattcaaatcacagagttcaacgatcctttacacagagcagacttgaaacactctttttgtgaaatttgcaagtggagatttcagccgctttgagttcaatggtagaataggaaatatcttcctatagaaactagacagaatgattctcagaaactcctttgtgatgtgtgcgttcaactcacagagtttaccctttcttttcatagagcagttaggaaacactctgtttgtaaagtctgcaattggatattcagacatccttgaggctttcgttggaaacagggatttcttcatattctgctagaaagaagaattctcagtaacttccttgtgttgtgtgtattcaactgacagagttgaacgatcctttacacagagcagacttgaaacactctttttgtggaatttgcaaggggagatttcaagcgctttggggccaaaggcagaaaaggacatatcttcgtataaaaactagacagaatcattctcagaaactgctctgcgatgtgtgcattcaactctcagagtttaatttttcttttcattcagcagtttggaaacattctctttgtaaagtctgcacgtggatattttgaccacttagaggccttcgttggaaacgggttttattcttgtaaggctagacagaagaattcccagtaacttccttgtgttgtgtacattcaacacacagatttgaacgttcccttagacagagctgatttgaaacactctttttgtgcaattggcaagtggagatttcaagcgctttaaggtcaatggcagaaaagtaaatatcttcgtttcaaaactagacagaatcattcccacaaactgcgttgtgatgtgttcgttcatctcacagagtttaacctttcttttcatagagcagttaggaaacactgtgtttgtaaattctgtaagtggatattctgacatcttgtggccttcgttggaaacgggatttcttcatattctgctagacagaagaattctcagtaacttccttgtgttgtgtgtattcaactcacagagttgaacgatcctttacacagagcagacttgaaacactctttttgtggaatttgcaagtggagatttcagccactttgatgtcaatggtagaaaaggaaatatcttcgtataaagactagacagagtgattctcagaaactcctttgtgatatctgcgttcaactcacagagttcaacctttcttttcatagagcagttaggaaacactctgtttgtaaagtctgcaattggatattgagacctccttgaggccttcgttggaaacgggatttcttcatattctgctatacagaagaattctcagaaacttccttgtgttgtgtgtattcaactcacagagttgaacgatcctttacacagagcagacttgaaacactctttttgtggaattggcaagtggagatttcagctgctttgaggtcaatggtagaaaaggaaatatcttcgtataaaaactagacagaatgattctcagaaactcctttgtgatgtgtgcgttcaactcacagagcttaaccttttttttcatagagcagttgggaaacactctgtttgtaaagtctgcaagtggatattcagacctccttgaggccttcgttggaaacgggatttcttcatattatgctagacagaagaattctcaggaacttccttgtgttgtgtgtattcaactcacagagttgaacgatcctttacacagagcagacttgaaacactctttttgtggaatttgcaagtggagatttcagccgctttgagttcaatggtagaataggaaatatcttcctatagaaagtacacagaatgattctcagaaactcctttgtgatgtgtgcgttcacctcacagagttcaacctttcttttcatagagcagttgggaaacactctgtttgtaaagtctgcaagtggatattcagacttctttgaggccttcgttggaagcgggatttcttcatattctgctagacagaagaattctcagtaactaccttgtgttgtgtgtattcaactgacagagttgaactttcatttagagagagcagatttgaaacactgtttttgtggaatttgcaagtggagatttcaagcgctttggggccaaaggcagaaaaggaaatatcttcgtataaaaactagacagaatcattctcagaaactgctgcgtgatgtgtgcgttcaactctcagagtttaacttttcttttcattcagcggtttggaaacactctgtttgtaaagtctgcacgtggaaattttgaccacttagaggccttcgttggaaacgggttttgttcatgtaaggctagacagaagaattcccagtaacttccttgtgttgtgtgcattcaactcacagagttgaacgttcccttagacagagcagatttgaaacactctatttgtgcaatttgcaagtgtagttttcaagctcttttaggtcaacggcagaaaaggaaatatcttggtttcaaaactagacagaaatcattcccacaaactgcgttgtaatgtgttcgttcaactcacagagtttaacctttctgttcatagagcagttaggaaacactctgtttgtaaagtctgtaagtggatattctgacatcttgtggccttcgttggaaacgggatttcttcatattctgctagacagaagaattctcagtaacttccttgtgttgtgtgtattcaactcacagacttgaacgatcctttacacagagcagacttgaaacactctttttgtggaatttgcaagtggagatttcagccgctttgaggtcaatggtagaaaaggaaatatcttcgtataaaaactagacagaatgattctcagaaacttctttgtgatgtgtgcgttcaactcacagagtttaacctttcttttcatagagcagttaggaaaccctctgtttgtaaactctgcaagtggatattcagacctctttgaggccttcgttggaaacgggatttcttcatactatgctagacagaagaattctcagtaacttccttgtgttgtgtgtattcaactgacacagttgaactttcatttagacagagcagatttgaaacactctttttgtggaatttgcaattggagatttcaagcgctttgaggccaaaggcagaaaaggaaatatcttcgtataaaaactagacagaatcattctcagaaactgctgcgtgatgtgtgtgttcaactctcagagtttaactttccttttcattcagcggtttggaaacactctgtttgtaaagtctgcacgtggatattttgaccacttagaagccttcgttggaaacgggtttttttgtatgtaaggctagacagaagaattcccagtaacttccttgtgttgtgtgcattcaactcacagagttgaacgttcccttagacagagcagatttgaaacactctatttgtccaatttgcaagtgtagatttcaagcgctttaaggtcaacggcagaaaaggaaatatcttcgtttcaaaactagacagaatcattcccacaaactgcgttgtgatgtgtacgttcaactcacagagtttaacctttctgttcatagagcagttaggaaacattctgtttgtaaagtctgtaagtggatattctgacatcttgtggccttcgttggaaacgggatttcttcatattctgctagacagaagaattctcagtaacttccttctgttgtgtgtattcaactcacagagttgaacgatcctttacacagagcagatttgaaacactctttttgtggaatttgcaagtggagatttcagccgctttgaagtcaaatgtagaaaaggaaatatcttcctataaaaactagacagaatgattctcagaaactcctttttgatgtgtgcgttcaactcacagagtttaacctttcttttcatagagcagttaggaaacactctgtttgtaaagtctgcaagtggatattcagacctctttgaggccttcgttggaaacgggtttttttcatataaggctagacagaagaattcccagtaacttccttgtgttgtgtgtgttcaactcacagagttgaactttcatttacacagagcagatttgaaacactctttttgtggaatttgcaagtggagatttcaagcgctttggggccaatggcagaaaaggaaatatcttcgtataaaaactagacagaaatcattctcagaaactgctctgcgatgtgtgcgttcaactctcagagtttaacttttcttttcattcagcagtttggaaacactctgtttgtaaagtctgcacgtggatattttgaccacttagaggccttctttggaaacgggtttttttcatgtaaggctagacagaagaattcccagtaacttccttgtgttgtgtatattcaactcacagagttgaacgttcccttagacagagcagatttgaaacactctttttgtgcaattggcaagtggagatttcaagcgctttaaggtcaatggcagaaaaggaaatatcttcgtttcaaaactagacagaatgattctcagaaactcctttgtgatgtgtgcgttcaactcacagagtttaacctttcttttcatagagcagttaggaaacactctgtttgtaaagtctgcaagtagatattcagacctccttgaggccttcgttggaaacgtgatttcttcatattatgctagacagaagaattctcagtaacttccttgtgttgcgtgtattcaactcacagatttgaacgatcctttacaaagagcagacttgaaacactctttttgtggaatttgcaagtggagatttcagccgctttgaggtcaatggtagaataggaaatatcttcctatagaaactagacagaatgattctcagaaactcctttgtgatgtgtgcgttcaactcacagagtttaacctttcttttcatagagcagttaggaaacactctgtttgtaaagtctgcacgtggatatttggacttccttgaggccttcgttggaaacggtttttttttcatgtaaggctagacagaagaattctcagtaacttcccttgtgttgtgtgtattcaactgacagagttgaactttcatttggagagagcagatttgaaacactgtttttgtggaatttgcaagtggagatttcaagcgctttggggccaaaggcagaaaaggaaatatcttcgtataaaaactagacagaatcattctcagaaactggctctgcgatgtgtgcgttcaactctcagagtttaacttttcttttcattcagcagtttggaaacactctgtttgtaaagtctgcacgtggatattttgaccacttagaggccttcgttggaaacgggtttctttcctgtaaggctagacagaagaattcccagtaacttcccttgtgttgtgtacattcaactcacagagttgaacgttcccttagacagagcagatttgaaacactctttttgtgcaattggcaagtggagatttcaagcgcgttgaggtcaatggcagaaaaggaaatatcttcgtttcaaaactagacagaatcattcccacaaactgcgttgtgatgtgttcgttcaactcacagagtttaacctttcttttcatagagcagttaggaaacagtctgtttgaaaattctgtaagtggatattctcacatcttgtggccttcgttggaaacgggatttcttcatattctgctagacagaagaattctcagtaacttccttgtgttgtgtttattcaactcacagagttgaatgatcctttacacagagcagacttgaaacactctttttgtggaatttgcaagtggagatttcagccgctttgaggtcaatagtagaaaaggaaatatcttcgtagaaaaactagacagaatgattctcagaaactcttttgtgatgtgtgcgttcaactcacagagtttaacatttctgttcatagagccgttaggaaacactctgtttgtaaagtctgcaagtggatattcacacctccttgagaccttcgttggaaacgggatttcttcatattctgctagacagaagaattttcagtaacttccttgtgttgtgtgtattcaactgacagagttgaactttcatttagacagagcagatttgaaacactctttttgtggaatttgcaagtggagatttcaagcgctttgaggccaaaggcagaaaaggaaatatgttcgtataaaaactagacagaatcattctcagaaactgctctgcgatgtgtgtgttcaactctcagagtttaacttttcttttccttcagcagtttggaaacactctgtttgtgaagtctgcacgtggatattttcaccacttagaggccttcgttggaaacgggtttttttcctgtaaggctagacagaagaattcccagtaacttccttgtgttgtgtacattcaactcacagagttgaacgttcccttagacagagcagatttgaaacactctttttgagcaattggcaaatggagatttcaagcgctttaaggtcaatggcagaaaaggaaatatcttcgtttcaaaactagacagaatgattctcataaactcctttgtgatgtgtgcgttcaactcacaaagtttaacttttcttttcatagggcagttaggaaacactctgtttgtaaagtctgcaagtggatattcagacctctttgaggccttcgttggaaacgggatttcttcatattatgctagacagaagaattctcagtaacttccttgtgttgtgtgtattcaactcacagagttgaacgatgctttacacagagcagacttgaaacattctttttgtggaatttgcaactggagatttcagccgctttgaggtcaatggtagaataggaaatatcttcctatagaaactagacagaatgattttgagaaactcctttgtgatgtgtgcgttcaactcacagagtttaacctttcttttcatagagcagttaggaaacactctgtttgtaaagtctgcaagtggatattcagacatccttgaggcttttgttggaaacgggatttcttcatattctgctagaaagaagaattctcagaaacttccttctgttgtgtgttttcaactcacagagttgaacgaacctttacacagagtagacttgaaacactctttttgtggaattggcaagtggagatttcagccgctttgaggtcaatggtagaaaaggaaatatcttcgtataaaaactagacagaataattctcagaaactcctttgtgatgtgtgcgttcaactcacggagtttaacctttcttttcatagagcagttaggaaacactctgtttgtaaagtctgcaagtggatattcagacctctttgaggccttcgttggaaacgggatttcttcatattatgctagacacaagaattcccagtaacttccttgtgttgtgtgtgttcaactcacagagttgaactttcatttacccagagcagatttgaaacactctttttgtggaatttgcaagtggagatttcaagagctttgaggccaaaggcagaaaaggaaatatcttcgtataaaaactagacagaatcattctcagaaactgctctgcgatgtgtgcgttcaactctcagagtttaacttttcttttcattcagcagtttggaaacactctgtttgtaatgtctgcacgtggataatttgaccacttagaggcattcgttggaaacgggtttttttcatgtaaggctagacagaagaattcccagtaacttccttgtgttgtgtgcattcaactcacagagttgaacgttcccttagacagagcagatttgaaacactctatttgtgcagtttgcaagtgtagatttcaagcgctttaaggtcaatggcagaaaaggaaatatcttcgtttcaaaacttgacagaaatcattcccacaaactgcgttgtgatgtgtgcgttcaactcaaagagtttaacctttcttttcatagagcagttaggaaacactctgtttgtaaagtctgcaagtggatattcagacctccttgaggccttcgttggaaacgggatttcttcatattctgctagacagaagaattctcagtaacttccttgtgttgtgtgtattcaactcacagagttgaatgatcctttacgcagaacagacttgaaacactcttgttgtggaatttgcaagtggagaattcagccgctttgagttcaacggtagaataggaaatatcttcctatagaaactagacagaacgattctcagaaactcctttgtgatgtgtgcgttcaactcacagagtttaacctttcttttcatagagcagttaggaagcactctgtttgtaaagtctgcaagtggatattcagacctctttgaggccttcgttggaaacgggatttcttcctattctgctagacagaagaattctcagtaacttccttgtgttgtgtgtattcaaatgacagagttgaactttcatttagagagagcagatttgaaacactgtttttgtggaatttgcaagtgaagatttcaagcgctttggggccaaaggcagaaaaggaaatatcttcgtataaaaactagacagaatcattctcagaaactgctctgtgatgtgtgcgtacaactctcagagtttaacttttcttttcattcagcagtttggaaacactctgtaaagtctgcacgtagatattttgaccacttagaggccttcgttggaaacgggtttttttcatgtaaggctagacagaagaattcccagtaacttccttgtgttgtgtgcattcaactcacagagttgaacgttcccttagacagagcagatttgaaacactctatttgtgcaatttgcaagtgtagatttcaagcgctttcaggtcaatggcagaaaaggaaatatcttcgtttcaaaactagacagaatcattcccacaaactgcgttgtgatgtgttcgttcaactcacacagcagttaggaaaccaactcacctttcttttcatagagcagttaggaaacactctgttggtaaattctgtaagtggatattctgacatcttgtggccttcgttggaaacgggatttcttcatattctgctagacagaagaattctcagtaacttccttgtgttgtgtgtattcaactcacagagttgaacgatcctttacacagagcagactttaaacactctttttgtggaatttgcaagtggagatttcagccgctttgaggtcaatagtagaaaaggaaatatcttcgtagaaaaactagaaagaatgattctcagaaactcctttgtgatgtgtgtgttctactcacagagtttaacctttcttttcatagagcagttagtaaacactctgtttgtaaagtctgcaagtggatattcagacccctttgaggccttcgttggaaacgggatttcttcatattatgctagacagaagaattctcagtaacttccttgtgttgtgtgtattcaactgacagagttgaactttcatttagagagagcagatttgaaacactgtttttgtggaatttgcaagtggagatttcaagcgctttggggccaaaggcagaaaaggaaatatgttcgtataaaaactagacagaatcattctcagaaactgctctgcgatgtgtgagttcaactctcagagtttaactttgcttttcattcagcagtttggaaacactctgtttgtaaagtctgcacgtggatattttgaccacttagaggccttcgttggaaacgggtttttttcatgtaaggctagacagaagaattcccagtaacttccttgtgttgtgtacattcaactcacagagttgaacgttcccttagacagagcagatttgaaacactctttttgtgcaattggcaagtggagatttcaagcgctttgaggtcaatggcagaaaaggaaatatcttcgtttcaaaactagacagaacgattctcagaaactcctttgtgatgtgtgcgttcaactcacagagtttaacctttcttttcatagagcagttaggaaacactctgtttgtaaagtctgcaagtggatattcagacctctttgtggccttcgttggaaacgggatttcttcatattctgctagacagaagaattctcagtaacttccttgtgttgtgtgtattcaactcacagagttgaacgatcctttacacagagcagacttgaaacactctttttgtggaatttgcaagtggagatttcagccgctttgaggtcaatagtagaaaaggtaatatcttcgtagaaaaactagacagaatgattctcacaaactcctttgtgatgtgtgtgttcaactcacagagtttaacctttcttttcttagagcagttaggaaacactctctttgtaaagtctgcaagtggatattcagacctctttgaggccttcgttggaaacgggtttttttcatataaggctagacagaataattctcagtaacttccttgtgttgtgtgtattcaactgtcagagttgaacgatcctttacagagagcagacttgaagcactctttttgtggaatttgcaagtggagatttcagccgctttgaggtcaatggtagaataggaaatatcttcctatagaaactagacagaatgattctcagaaactcctttgtgatgtgtgcgttcaactcacagagtttaacttttcttttcatagagcagttaggaaacactctgtttgtaaagtctgcaagtggatattcagacgtctttgaggccttcgttggaaacgggatttcttcatattatgctagacagaagaattctcagtaacttccttgtgttgtgtgtattcaactcacagagttgaacgatgctttacacatagcagacttgaaacactctttttgtggaatttgcaagtggagatttcagccgctttgaggtcaatggtagaaaaggaaatatcttcgtataaagactagacagaatgattctcagaaactcctttgtgatgtgtgcgttcaactcacagagtttaacctttcttttcatagagcagttaggaaacactctgtttgtaaagtctgcaagtggatattcagacctctttgaggccttcgttggaaacgggtttttttcttataaggctagacagaagaattctcagtaacttccttgtgttgtgtgtattcaactcacagagttgaacgatcctttacacagagcagacttgaaacactctttttctggaatttgcaagcggagatttcagctgcgttgaggtcaatggtagaaaaggaaatatcttcgtataaaaactagacagaatgattctcagaaactcctttgtgatgtgtgcgttcaactcacagagtttaacctttctgttcatagagcagttaggaaacactctgtttgtaaagtctgcaagtggatattcagacctctttgagaccttcgttggaaacgggatttcctcatattctgctagacagaagaattcccagtaacttccttgtgttgtgtgtgttcaactcacagagttgaactttcatttacacagagcagatttgaaacactctttttgtggaatttgcaagtggagatgtcaagcgctttgaggccaaaggcagaaaaggaaatatcttcgtataaaaactagacagaatcattctcagaaactgctgcgtgatgtgtgcgttcaactctcagagtttaacttttcttttcattcagcggtttggaaacactctgtttgtaaagtctgcacgtggatattttgaccacttagaggccttcgttggaaacgggttttttgcatgtaaggctagacagaagaattctcagtaacttccttgtgttgtgtgtattcaactcacagagttgaacgttcccttagacagagcagatttgaaacactctatttgtgcaatttgcaagtgtagttttcaagctctttaaggtcaacggcagaaaaggaaatatcttcgtttcaaaactagacagaatcattcccgcaaactgcgttgtgatgtgttcgttcaactcacagagtttaacctttctgttcatagagcagttaggaaacactctgtttgtaaagtctgtaagtggatattctgacatcttgtggccttcgttggaaacgggatttcttcatattctgctagacagaagaattctgagaaacttccttgtgttgtgtgttttcaactcacagagttgaacgatgctttacacagagtagacttgaaacactgtttttgtgtaatttgcaagtggagatttcagccgctttgaggtcaatggtagaaaaggaaatatcttcgaataaaaactagacagaatgattctcagaatcttctttgtgatgtgtgcgttcaactcacagagtttaacctttcttttcatagagcagttaggaaacactctgtttgtatactctgcaagtggatattcagtcctcattgaggccttcgttggaaacgggatttcttcatactatgctagacagaagaattcccagtaacttccttgtgttgtgtgtgttcaactcacagagttgaactttcatttacacagagcagatttgaaacactctttgtgtggaatttgcaagtggagatttcaagcgctttgaggccaaaggcagaaaaggaaatatcttcgtttcaaaactagacagaatcattctcagaaactgctctgcgatgtgtgcgttcaactctcagagtttaacttttcttttcattcagcagtttggaaacactctgtttgtaaactctgcaagtggatattcagacctctttgaggccttcgttggaaacgggatttcttcatactatgctagacagaagaattctcagtaacttccttgtgttgagtgtattcaactgacagagttgaactttcatttagagagagtagttttgaaacactgtttttgtggaatttgcaagtggagatttcaagcgctttggggccaaaggcagaaaaggaaatatcttcgtataaaaactagacagaatcgttctcagaaactgctgcgtgatgtgtgcgttcaactctcagagtttaacttttcttttcattcagcggtttggaaacactctgtttgtaaagtctgcacgtggacagtttgaccacttagaggccttcgttggaaacgggtttttttcatgtaaggctagacagaagaattcccagtaacttccttgtgttgtgtgcattcaactcacagagttaaacgttcccttagacagagcagatttgaaacactctatttgtgcaatttgcaagtgtagatttcaagcgctttaaggtcaacggcagaaaaggaaatatcttcgtttcaaaactagacagaatcattcccacaaactgcgttgtgatgtgttcgttcaactcacagagtttaacctttccgttcatacagcagttaggaaacactctgtttgtaaagtctgtaagtggatattctgacatcttgtggccttcgttggaaacgggatttcttcatattctgctagacagaagaattctcagtaacttccttgtgttgtgtgtattcaactcacagagttgaacgagcctttacacagagcagacttgaaacactctttttgtggaatttgcaagtggagatttcagccgctttgaggtcaatggtagaataggatatatcttcctatagaaactagacagaatgattctcagaaactcctttgtgatgtgtgcgttcaactcacagagtttaacctttcttttcatagagcagttaggaaacactctgtttgtaaagtctgcaattggatattcagacctctttgaggccttcgttggaaacgggatttcttcatattccgctagacagaagaattctcagtaacttccttgtgttgtgtgtattcaactcacagagttgaacgatcctttacacagagcagacttgaaacactctttttgtgtaatttgcaagtggagatttcagccgctttgaggtcaatagtagaaaaggaaatatcttcgtagaaaaactagacagaatgattctcagaaactcctttgtgatgtgggcgttcaactcacagagtttaacctttcttttcatagagccgttaggaaacactctgtttgtaaagtctgcacgtggatatttggacttctttgaggccttcgttggaaacgggtttttttcatgtaaggctagacggaagaattcccagtaacttccttgtgttgtgtacattcaactcacagagttgaacgttcccttagacagagcagatttgaaacactctttttgtgcaattggcaaatggagatttcaagcgctttaagttcaaaggcagaaaaggaaatatcttcgtttcaaaactagacagaatcattcccacaaactgcgttatgatgtgttcgttcatctcacagagtttaacctttcttttcatagagcagttaggaaacagtctgtttgtaaattctgtaagtggatattctgacatcttgtggccttcgttggaaacgggatttcttcatattctgctagacagaagaattctcaggaacttccttgtgttgtgtgtattcaactcacagagttgaacgatcctttacacagagcagacttgaaacacactttttgtggaatttgaaagtggagatttcagccgctttgaggtcaatggtagaataggaaatatcttcttatagaaactagacagaatgattctcagaaactcctttgtgatgtgtgcgttcaactcacagagtttaacctttcgtttcatagagcagttaggaaacactctgtttgtaaagtctgcaattggatattaagacctctttgaggccttcgttggaaacgggatttcttcatattctgctagacagaagaattctcagtaacttccttgtgttgtgtgtattcaactcacagagttgaacgatcctttacacagagcagtcttgaaacactctttttgtggaatttgcaagtggagatttctgccgttttgaggtcaatgatagaataggaaatatcttcctatagaaactagacagaatcattctcagaaactgctctgcgatgtgtgcgttcaactctcagagtttaacttttcttttcattcagcagtttggaaacactctgtttgtaaagtctgcacgtggataacttgaccacttataggccttcgttggaaacgggtttttttcatgtaaggctagacagaagaattcccagtaacttccttgtgttgtgtacattcaactcacagagttgaacgttcccttagacagagcagatttgaaacactctttttgtgcaattggcaagtggtgatttcagccgctttgaggtcaatggtagaaaaggaaatatcttcgtataaaaactagacagaatcattctcagaaactgcactgcgatgtgtgcgttcaactctcagagtttaacttttcttttcattcagcagtttggaaacactctgtttgtaaagtctgcacgtggataatttgaccacttagaggccttcgttggaaacgggtttttttcatgtaaggctagacagaagaattctcagtaacttccttgtgttgtgtgtattcaactcacagagttgaacgatcctttacacagagcagacttgtaacactctttttgtggaatttgccagtggagatttcagccgctttgaagtcaaaggtagaaaaggaaatatcttcctataaaaactagacagaatgattctcagaaacttctttgtgatgtgtgcgttcaactcacagagtttaacctttcttttcatagagcagttaggaaacactctgtttgtaaaatctgcaagtggatattcagacctctttgaggccttcgttggaaacgggatttcttcatactatgctagacagaagaattcccagtaacttccttgtgttgtgtgtgttcaactcacggagttgaactttcatttacacagagcagatttgaaacactctttttgtggaatttgcaagtggagatttcaagcgctttgaggccaaaggcagaaaaggaaatatcttcgtttgaaaactagacagaatcattctcagaaactgctctgtgatgtgtgcgttcaactctcagagtttaacttttcttttcattcagcagtttggaaacactctgtttgtaaagtctgcacgtggataatttgaccacttagaggccttcgttggaaacggttttttttaatgtaaggctagacagaagaattcccagtaacttccttgtgttgtgtgcattcaactcacagagttgaacgttcccttagacagagcagatttgaaacactctatttgtgcaatttgcatgtgtagatttcaagcgctttaaggtcaatggcagaaaaggaaatatcttcgtttcaaaactagacagaatcattcccacaaactgcgttgtgatgtgttcgttcaactcacagagttttacctttctgttcatagagcagttaggaaacactctgtaaagtctgtaagtggatattctgacatcttgtggccttcgttggaaacgggatttcttcatattctgctagacagaagaattctcagtaacttccttgtgttgtgtgtattcaactcacagagttgaacgatcctttacacagagcagacttgaaacactctgtttgtggaatttgcaagtggagatttcagccgctttgatgtcaatggtagaaaaatgaaatatcttcgtataaagactagacagaatgattctcagaaactcttttgtgatgtgtgcgttcaactcacagagtttaacctttctgttcatagagccgttaggaaacactctgtttgtaaagtctgcaagtggatattcacacctccttgagaccttcgttggaaacgggatttcttcatattctgctagacagaagaattcccagtaacttccttgtgttgtgtgtgttcaactcacagagttgaactttcatttacacagagcagatttgaaacactctttttgtggaatttgcaagtggagatttcaagcgctttgaggccaaaggcagaaaaggaaatatcttcgtttcaaaactagactagaatcattctcggaaactgctctgtgatgtgtgcgttcaactctcagagtttaacttttcttttcattcagcagtttggaaacactctgtttgtaaagtctgcacgtggatattttgaccacctaaaggccttcgttggaaacgtgtttttttcctgtaaggctagacagaagaattcccagtaacttccttgtgttgtgtacattcaactcacagagttgaacgttcccttagacagagcagatttgaaacactctttttgtgcaattggcaagtggtgatttcagccgctttgaggtcaatggtataaaaggaaatatcttcgtattaaaactagacagaatgattctcagaaacttcattgggatgtgtgcgttcaactcacagagtttaacctttcttttcatagagcagttaggaaacactctgtttgtaaactctgcaagtggatattcagacctctttgaggccttcgttggaaacgggatttcttcatactgtgctagacagaagaattctcagtaacttccttgtgttgtgtgcattcaactcacagagttgaacgatcctttacacagagcagattagaaaccctctttttgtggaatttgcaagtggagatttcaagcactttgaggtcaatggtagaaaaggaaatatcttcgtataaaaactagacagaatgattctcagaaacttctttgtgatgtgtgcgttcaactcacagagtttaacctttcttttcatagagcagttaggaaacactctgtttgtaaactctgcaagtggatattcagacctctttgaggccttcgttggaaacgggtttttttcatataaggctagacagaagagttctcagtaacttccttgtgttgtgtgtattcaactgacagagttgaactttcatttagagagagcagatttgaaacactgtttttgtggaatttgcaagtggagatttcaagcgctttggggccaaaggcagaaaaggaaatatcttcgtataaaaactagacagaatcattctcagaaactgctgcgtgatgtgtgcgttcaactctgagagtttaacttttcttttcattcagcggtttggaaacactctgtttgtaaagtctgcacgtggaaattttgaccacttagaggccttcgttggaaacgggattttttcatgtaaggctagacagaagaattctgagtaacttccttgtgttgtgtgtattcaactgacagagttgaactttcatttagagagagcagatttgaaacactgtttttgtggaatttgcaattggagatttcaagcgctttggggccaaaggcagaaaaggaaatatcttcgtataaaaactagacagaatcattctcagaaactgctctgcgatgtgtgcgttcaactctcagagtttaacttttcttttcattcagcagtttggaaacactctgtttgtaaagtctgcacgtggataatttgaccacttagaggccttcgttggaaacgggtttttttcatgtaaggttagacagaagaattctcagtaactttccttgtgttgtgtgtattcaactcacacagttgaacgatcctttacacagagcagacttgtaacactctttttgtggaatttgcaagtggagatttcagccgctttgaagtcaaaggtagaaaaggaaatatcttcctataaaaactagacagaaatgattctcagaaactcctttgtgatgtgtgcgttcaactcacagagtttaacctttcttttcatagagcagttaggaaacactctgtttgtaaagtctgcaagtggatattcagacctctttgaggccttcgttggaaacgggatttcttcatactatgctagacagaagaattctcagtaatttccgcgtgttgtgtgtattcaactcacagagttgaacgatcctttacacagagcagacttgaaacactctttttgtggaatttgcaagtggagatttcagccgctttgaagtcaaaggtagaaaaggaaatatcttcctataaaaactagacagaatcattctcagaaactgctgcgtgatgtgtgcgttgaactctcagagtttaacttttcttttcattcagcggtttggaaacactctgtttgtaaagtctgcacgtggatattttgaccacttagaggccttcgttggaaaccggtttttttcatgtaagcctagacagaagaattcccagtaacttccttgtgttgtgtgcattcaactcacagagttgaacgttcccttagacagagcagatttgaaacactctatttgtgcaatttgcaagtgtagttttcaagctctttaaggtcaacggcagaaaaggaaatatcttggtttcaaaactagacagaatcattcccacaaactgcgttgtgatgtgttcgttcaactcacagagtttaacatttctgttcatagagcagttaggaacactctgtttgtaaagtctgtaagtggatattctgacatcttgtggccttcgttggaaacgggatttcttcatattctgctagacagaagaattctcagtaacttccttgtgttgtgtgtattcaattcacagtgttgaacgatcctttacacagagcatacttgaaacactcttcttgtggaatttgcaagtggagatttcagccgatttgaggtcaatggtagaataggaaatatcttcgtataaaaactagacagaatgattctcagaaactcctttgtgatctgtgtgttcaactcacagagtttaacctttcttttcatagagcagttaggaaacactctgtttctaaagtctgcaagtggatattcagacctctttgaggccttcgttggaaacgggtttttttcatataaggctagacagaagaattctcagtaacttcattgtgttgtgtttattcaactcacagagttgaatgatcctttacacagagcagacttgaaacactctttttgtggaatttgcaagtggagatttcagccgctttgaggtcaatggtagaaaagtaaatatcttcgtataaagactagacagaatgattctcagaaacttctttgggatgtgtgcgttcaactcacagagtttaacctttcttttcatagagcagttaggaaacactctgtttgtaaactctgcaagtggatattcagacctctttgaggccttcgttggaaacgggatttcttcatactatgctagacagaagaattcccagtaacttccttgtgttgtgtgtgttcaactcacagatttgaactttcatttacacagagcagatttgaaacactctttttgtggaatttgcaagtggagatttcaatggctttgaggccaaaggcagaaaaggaaatatcttcgtttcaaaactagacagaatcattctcagaaactgctctgcgatgtgtgcgttcaactctcagagtttaacttttcttttcattcagcagtttggaaacactctgtttttaaagtctgcacgtggatattttgaccacttagacgccttcgttggaaactggtttttttccagtaaggctagacagaataattctcagtaacttcccttgggttgtgtgtattcaactcacagagttgaaggatcctttacagagagcaggcttgaaacactctttttgtcgaatttgcaagtggagatttcagccgctttgtggtcaatggtagaataggaaatatcttcttatagaaactagacagaatgattctgagaaactcctttgtgatgtgtgcgttcaactcacagagtttaacctttcttttcatagagcagttaggaaacactctgtttctaaagtgtgcaagtggatattcagacctccttgaggccttcgttggaaacgggatttcttcatattatgctagacagaagaattcccagtaacttccttgtgttgtgtgtgttcaactcacagtgttgaactttcatttacacagagcagattggaaacactctttttgtggaatttgcaagtggagatttcaagcgctttgaggccaaaggcagaaaaggaaatatcttcgtataaaaactagacagaatgattctcagaaacttctttgtgatgtgtgcgttcaactcacagagtttaacctttcttttcatagagcagttaggaaacactctgtttgtgaactctgcaagtggatattcagacctgtttgaggccttcgttggaaacgggatttcttcatactattctagacagaagaattctcagaaactcccttgtgttgtgtgtattcaactgacagagttgaactttcatttagacagagcagatttgaaacactctttatgtggaattggcaagtggagatttgaagcgctttgagaccaaaggcagaaaaggaaatatcttcgtttcaaaactagacagaatcattcccacaaactgcgttgtgatgtgttcgttcaactcacagggtttaacctttcttttcatagagcagttaggaaacactctgtttgtaaagtctgtaagtggatattctgacatcttgtggccttctttggaaacgggatttcttcatattctgctagacagaagaattctcagtaacttccttgtgttgtgtgtattcaactgacagagttgaaggatcctttacagagagcaggcttgaaacactctttttgtcgaatttgcaagtggagatttcagccgctttgaggtgaatggtagaataggaaatatcttcttatagaaactagacagaatgattctcagaaactcctttgtgatgtgtgcgttcaactcacagagtttaacctttcttttcatagagcagttaggaaacactctgtttgtaaagtctgcacgtggatatttggacttctttgaggccttcgttggaaacgggtttttttcatgtaaggctagacggaggaattctcagtaacttccttgtgttgtgtgtattcaactgacagagttgaactttcatttagagagaggagatttgaaacactgtttttgtggaatttgcaagtttagatttcaagcgctttggggccaaaggcagaaaaggaaatatcttcgtataaaaactagacagaatcattctcagaaactgctctgcgatgtgtgcgttcaactctcagagtttaacttttcttttcattcagaagtttggaaacactctgtttgtaaagtctgcacgtggatattttgaccatttagaggctttcgttggaaacgggtttttttcttgtaaggctagacagaagaattctcagtaacttcattgtgttgtgtgtattcaactcacagagttcaacgatcctttacacagagcagacttgaaacactctttttctggaatttgcaagtggagatttcagccgctttgaggtcaatggtagaaaagaaatatcttcctataaaaactagacagaatgattctcagaaactcctttgtgatgtgtgcgttcaactcacagaggttaacctttcttttcatagagcagttaggaaacactctgtttgtaaagtctgcaagtggagattcagacctgcttgaggcattcgttggaaacgggatttcttcatattatgctagacagaagaattctcagtaagttccttgtagtgtgtgtattcaactcacagagttgaacgatcctttacacagagcagacttgaaacactctttttgtgtaatttgcaagtggagatttcagccgctttgaggtcaatggtagaataggaaatatcttcctatagaaactagacagaatgattctcagaaactcctttgtgatgtgtgcgttcaactcacagagtttaacctttcttttcatagagcagttgggaaacactctgtttgtatagtgtgcaagtggatattcagacctctttgaggccttcgttggaaacgggatttcttcatattctgctagacagaagaattcccagtaactttccttgtgttgtgtgtgttcaactcacagagttgaacttccatttacacagagcagatttgaaacactctttttgtggaatttgcaagtggagatttcaagcgctttgaggccaaaggcagaaaaggaaatatcttcgtttcaaaactagacagaatcattctcagaaactgctctgcgatgtgtgcgttcaactctcagagtttaacctttcttttcattcagcagtttggaaacactctgtttgtaaagtctgcacgtggatattttgaccatttagaggccttcgttggaaacgggtttttttcttgtaaggctagacagaagaattcccagtaacttccttgtgttgtgtacattcaactcacagagttgaacgttcccttagacagagcagatttgaaacactctttttgtgcaattggcaagtggagatttcaagcgctttaaggtcaatggcagaaaaggaaatatcttcgtttcaaaactagagagaatcattcccacaaactgcgttgtgatgtgttcgttcaactcacagagtttaacctttcttttcatagagcagttgggaaacagtctgtttgaaaattctgtaagtggatattctgacatcttgtggccttcgttggaaacgggatttcttcatattctgctagacagaagaattctcagtaacttccttgtgttgtgtgtattcaactcacagagttgaacgatcctttacacagagcagacttgaaacactctttttgtggaatttgcaagtggagatttcagccgctttgaggtcaatagtagaaaaggaaatatcttcgtagaaaaactagacaagaatgattctcagaaactcctttgtgatgtgtgcgttcaactcacaaagttcaacctttcttttcatagagcagttgggaaacactctgtttgtaaagtctgcaagtggatattcagacttctttgaggccttcgttggaagcagggatttcttcatattctgctagacagaaaaattctcagtaacttccttgtgttgtgtgtattcaactcacagagttgaacgatcctttacacagagcagacttgaaacactctttttgtcgaatttgcaagtggagatttcagccgctttgaggtcaatggtagaataggaaatatcttcttatagaaactagacagaacgattctcagaaactgctttgtgatgtgtgcgttcaactcacagagtttaacctttcttttcatagagcagttaggaaacactctgtttgtaaagtctgcaagtggatattcagacctctttgaagccttcgttggaaacgggattgcttcatattctgctagacagaagaattctcagaaacttccttgtgttgtgtgtattcaactcacagagtttaacgatcgtttacacagaacagacttgagacactctttttgtggaatttgtaagtggagatttcagccactttgaggtcaatggtagaaaaggaaatatcttcatataaaaactagacagaataattctcagaaactgctgcgtgatgtgtgcgttcaactctcagagtttaacttttcttttcattcagcggtttggaaacactctgtttgtaaagtctgcacgtggttattttgaccacttagaggccttcgttggaaacgggttttcttcatgtaaggctagacagaagaattcccagtaacttccttgtgttgtgtacattcaactcacagagttgaacgttcccttagacagagcagatttgaaacactctttttgtgcaattggcaagtggtgatttcagcctctttgaggtcaatggtagaaaaggaaatatcttcgtacaaaaactagacagaatgattctcagaaactcctttgtgatgtgtgcgttccactcacagagtttaacctttcttttcatagagcagttaggaaacactctgtttgtaaagtctgcaagtggatattcagacctccttgaggccttcgttggaaacgggatttctacatattatgctagacagaagaattctcagtaacttccttgtgttgtgtgtattcaactcacagagttgaacgatcctttacacagagcagacttgaaacactctttttgtgaaatttgcaagtggagatttcagcctctttgaggtcaatggtagaataggaaatatcttcctatagaaactagacagaatgattctgagaaactcctttgtgatgtgtgcattcaactcacagagtttaacctttcttttcatagagcagttaggaaacactctgcttgtaaagtctgcaagtggatactcagacctccttgaggccttcgttggaaacgggatttcttcctattatgctagacagaagaattcccagtaacttccttgtgttgtgtgtgttcaactcacagagttgaactttgatttacacagagcagatttgaaacactctttttgtggaatttgcaagtggagatttcaagcgctttgaggccaaaggcagaaaaggaaatatcttctgtataaaaactagactagaatcattctcagaaactgctgcgtgatgtgtgcgttcaactctcagagtttaacttttcttttcattcagcggtttggaaacaccctgtttgtaaagtctgcacgtggatattttgaccacttagaggccttcgttggaaacgggattttttcatgtaaggctagacagaagaattcccagtaacttccttgtgttgtgtacattcaactcacagagttgaacgttcccttagacagagcagatttgaaacactctttttgtgcaattggcaaatggagatttcaagcgctttaaggtcaatggcaggaaaggaaatatcttcgtttcaaaactagacagaatgattctcagaaccttctttgtgatgtgtgcgttcaactcacagagtttaacctttcttttcatagagcagttaggaaacactctgtttgtaaactctgcaagtggatattcagacctctttgaggccttcgttggaaacgggatttcttcatactatgctagacagaagaattctcagtaacttccttgtgttgtgtgtattcaactcacagagttgaacgatcctttacacagagcagacttgtaacactctttttgtggaatttgcaagtggagatttcagccgctttgaagtcaaaggtagaaaagggaatatcttcctataaaaactagacagaatgattctcagaaactcctttgtgatgtgtgcgttcaactcacagagtttaacttttcttttcatagagcagttaggaaacactctgtttgtaaagtctgcaagtggatattcagacctctttgaggccttcgtttgaaatgggatttcttcatattatgctagacagaagaattctcagtaacttccttgtgttgtgtgtattcaactgacagagttgaactttcatttagagagagcagatttgaaacactgtttttgtggaatttgcaagtggagatatcaagcgctttggggccaaaggcagaaaaggaaatatcttcgtataaaaactagacagaatcattctcagaaactgctctgtgatgtgtgcgttcaactctcagagtttaacttttcttttcattcagcagtttggaaacactctgtttgtaaagtctgcacgtggataatttgaccacttagaggccttcgttggaaactggtttttttcatgtaaggctagacagaaagaattcccagtaacttccttgtgttgtgtacattcaactcacagagttgaacgttcccttagacagagcagatttgaaacactctttttgtgcaattggcaaatggagatttcaagcgctttaagttcaatggcagaaaaggaaatatcttcgtttcaaaactagacagatcattcccacaaactgcgttgtgatgtgttcgttcaactcacagagtttaacctttcttttcgtagagcagttaggaaacagtctgtttgtaaattctgtaagtggatattctgacatcttgtggccttcgttggaaacgggatttcttcatattctgctagacagaagaattctcagaatcttccttgtgttgtgtgtattcaactcacagagttgaacgatcctttacacagagcagacttgtaacactctttttgtggaatttgcaagtggagatttctgccgctttgaagtcaaaggtagaaaaggaaatatcttcctataaaaactagacagaatgattctcagaaactcctttgtgatgtgtgcgttcaactcacatagtttaacctttcttttcatagagcagttaggaaacactctgtttgtaaagtctgcaagtggatattcagacatcctagaggctttcgttggaaacgggatttcttcatattctgctagacagaagaattctcagaaacttcgttgtgttgtgtgttttcaactcacagagttcaacgatcctttacacagagtagacttgaaacactctttttgtggaagtggcagggtggagatttcagccgctttgaggtcaatggtagaaaaggaaatatcttcgtatgaaaactagacagaatgattctcagaaactcctttgtgatgtgtgcgttcaactcacagagtttaacttttcttttcatacagcagttaggaaacactctgtttgtaaagtctgcaagtggatattcagacctctttgaggccttcgttggaaacgggatttcttcatattatgctagacagaagaattctcagtaacttccctgtgttgtgtgtattcaactcacagagttgaacgatcctttacacagagcagacttgaaacactctttttgtggaatttacaagtggagatttcagccgatttgaggtcaatggtagaaaaggaaatatcttcctatagaaactagacagaatgattctcagaaactcctttgtgatgtgtgcgttcaactcacagagtttaactttccttttcatagagcagttaggaaacactctgtttgtaaagtcttcatgtggatattcattcctctttgaggccttcgttggaaacgggatttcttcatattctgctagacagaagaattctcagtaacttccttgtgttgtgtgtattcaactcacagagttcaacgatcctttacacagagcagacttgaaacactctttttgtggaatttgcaagtggagatttcagccgctttgaagtcaatggtagaaaaggaaatatcttcgtataaaaactagacagataatcattcccacaaactgcgttgtgatgtgttcgttcaactcacagagtttaaccgttcttttcatagagcagttaggaaacactctgtttgtaaattctgtaagtggatattctgacatcttgtggccttcgttggaaacgggatttcttcatgttctgctagacagaagaattctcagtaacttccttgtgttgtgtgtattcaactcacagagttgaacagtggtttacacagagcagatttgaaacactctttttgtggaatttgcaagtggagatttcagccgctttgaggtcaatggtagaaaaggaaatatcttcgtataaaaactagacagaatgattctcataaactcctttgtgatgtgggcgttgaactcacagagtttaacctttcttttcatagagcagttaggaaccactctgtttgtaaagtctgcaaatggatattcagacctctttgaggccttctttggaaacgggatttgttcatattctgctagacacaataattctcagtaacttccttgtgttgtgtgtattcaactcacagagttgaacgatcctttatagagagcagacttgaaacactctttttgtggaatttgcaagtggagatttcagcctctttgaggtcaatggtagaataggaaatatcttcctatagaaactagacagaacgattctcagaaactcctttgtgatgtgtgcgttcaactcacagagtttaacctttcttttcatagagcagttaggaaacactctgtttgtaaagtctgcacgtggatattcagacgtctttgaggccttcgttagaaacgggatttcttcctattctgctagacagaagaattctcagtaacttccttgtgttgtgtgtattcaactcacagagttgaacgatcctttacacagagcagacttgaaacactctttttgtggaatttgcaagtggagatttcagccgctttcaggtcaagagaagaaaaggaaatatcttcgtagaaaaactagacagaatgattctcagaaactcctttgtgatgtgtgctttcaagtcacagagtttaacctttcttttcatagagcagttaggaaacactctgtttgtaaagtctgcaagtggatattcagacgtctttgaggccttcgttggaaacgggatttcttcatattctgctagacagaagaattcccagtaacttccttgtgttgtgtgtgttcaactcacagagttgaactttcatttacacagagcagattagaaacactctttttgtggaattcgcaagtggagatttcaagcgctttgaggccaaaggcagaaaaggaaatatcttcgtttcaaaactagacagaatcattctcagaaactgctctgcgatgtgtgcgttcaactctcagagtttaacttttcttttcattcagcagtttggaaacactctgtttgtaaagtctgcacgtggatattttgaccacttagaggccttcgttggaaacgggttttattcctgtaaggctagacagaagaattcccagtaactaccttgtgttgtgtgcattcaactcacagagttgaacgttcccttagacagagcagatttgaaacactctatttgtgcaatttgcaagtgtagatttcaagcgctttaaggtcaacggcagaaaaggaaatatcttcgtttcaaaattagacagaatcattcccacaaactgcgttgtgatgtgttcgttcaactcacagagtttaacctttctgttcatagagcagttaggaaacactctgtttgtaaagtctgtaactggatattctgacatcttgtggccttcgttggaaacgggatttcttcatattctgctagacagaagaattctcagtaacttccttgtgttgtgtgtattcaactcacagagttgaacgaccctttacagagagcagacttgaaacactctttttgtggaatttgcaagtggagatttcagccgctttgaggtcaatggtagaaaaggaaactatcttcgtataaagactagacagaatgattctcagaaactgttttgtgatgtgtgcgttcaactcacagagttcaacctttcttttcatagagcagttgggaaacactctgtttgtaaagtctgcaagtggatattcagacttctttgaggccttcgttggaagcgggatttcttcatattctgctagacagaagaattcccagtaacttccttgtgttgtgtgtgttcaactcacagagttgaactttgatttacacagagcagatttgaaacactctttttgtggagtttgcaagtggagatttcaagcgctttgaggccaaaggcagaaaaggaaatatcttcgtataaaaactagagagaatcattctcagaaagtgctctgcgatgtgtgcgttcaactctcagagtttaacttttcttttcattcagcagtttggaaacactctgtttgtaaagtctgcacgtggatattttgaccacttagaggccttcgttggaaacgggtttttttcttgtaaggctagacagaagaattcccagtaacttccttgtgttgtgtgcattcaactcacagagttgaacgttcccttagacagagcagatttgaaacactctatttgtgtaatttgcaagtgtagatttcaagcgctttaaggtcaacggcagaaaaggaaatatcttcgtttcaaaactagacagaaatcattcccacaaactgcgttgtgatgtgttcgttcaactcacagtgtttaacctttcttttcatagagcaggtaggaaccagtctgtttgtaaattctgtaagtggatattctgacatcttgtggccttcgttggaaacggggtttcttcatattttgctagacagaagaattctcagtaacttccttgtgttgtgtttattcaactcacagagttgaatgctcctttacacagagcagacttgaaacactctttttgtggaatttgcaagtggagatttcagaggctttgaggtcaatggtagaaaagtaaatatcttcgtataaagactagacagaatgattctcagaaactcctttgtgatgtgtgcgttcaaatcacagagtttaacttttcttttcatagagcagttaggaaacactctgtttgtaaagtgtgcaagtggatattcagacctctttgaggccttcgttggaaacgggatttcttcatattatgctagacagaagaattctcagtaacttcccttgtgttgtgtgtattcaactcacagagttgaacgatcctttacacagagcagacttgaaacactctttttgtggaatttgcaagaggagatttcagccgctttgaggtcaatagtagaaaaggaaacatcttcgtagaaaaactagacagaatgattctcagaaactcctttgtgatgtgtgcgttcaactcacagagtttaactttccttttcatagagcagttaggaaacactctgtttgtaaagtctgcaagtggatattcagacctctttgaggccttcgttggaaacgggatttcttcatattctgctagacagaagaattcccagtaagttccttgtgttgtgtgtgttcaactcacagagttgaactttcatttacacagagcagatttgaaacactctttttgtggaatttgcaagtggagatttcaagcgctttgaggccaaaggcagaaaaggaaatgtcttcgtttcaaaactagacagaatcattctcagaaactgctgcgtgatgtgtgcgttcaactctcagagtttaacttttcttttcattcagcggtttggaaacactctgtttgtaaagtctgcacgtggatattttgaccccttagaggccttcgttggaaacgggtttttttcatgtaaggctagacagaagaattctcagtaagttccttgtgttgagtgttttcaactcacagagttgaacgatgctttacacagagtagacttgaaacactcttgttgtggaatttgcaagtggagatttcagccgctttgaggtcaatggtagaataggaaatatcttcctatagaaactagacagaatgattctcagaaactcctttgtgatgtgtgcattcaactcacagagtttaacctttcttttcatagagcagttaggaaacattctgtttgtaaagtctgcaagtggatattcagacctctttgaggacttcgttggaaacgggattttttcatattatgctagacagaagaattctcagtaacttccttgtgttgtgtgtattcaactcacagagttgaacgatcctttacacagagcagacttgaaacactcttgttggggaatttgcaagtggagatttcagccgctttgaggtcaatggtagaaaaggaaatatcttcctataaaaactagacagaatgattctcagaaactcctttgtgatgtgtgcgttcaactcacagagtttaacctttctgttcatagagcagttaggaaacactctgtttgtaaagtctgtaagtggatattcagacctccttgaggccttcgttggaaacgggatttcttcatattctgctagacagaagaattcccagtaacttccatgtgttgtgtgtgttcaactcacagagttgaaatttcatttacacagagcagatttgaaacactctttttgtggaatttgcaaatggagatttcaagcgctttgaggccagaggcagaaaaggaaatatcttcgtataaaaactagacagaatcattctcagaaactgctctgcgatgtgtgcgttcaactctcagagtttaacttttcttttcattcagcagtttggaaacactctgtttgtaaagtctgcacgtggataatttgaccacttagaggtcttcgttggaaacgggtttttttcatgtaaggctagacagaagaattcccagtaacttccttgtgttgtgtgcattcaactcacagagttgaacgttcccttagacagagcagatttgaaacactctatttgtgcaatttacaagtgtagatttcaagcgctttaaggtcaatggcagaaaaggaaatatcttcgtttcaaaactagacagaatgattctcataaactcctttgtgatgtgtgcgttcaacacacagagtttaacttttcttttcatagagcagttaggaaacactctgtttgtaaagtctgcaagtggatattcagacctctttgaggccttcgttggaaacgggatttcttcatattctgctagacagaagaattctcagtaacttccttgtgttgtgtgtattcaactcacagagttgaacgatcctttacagagagcagactttaaacactctttttgtggaatttgcaagtggagatttcagccgctttgaggtcaatggtagaaaaggaaatatcttcgtataaagactagacagaatgattctcataaactcctttgtgatgtgtgcgttcaactcacagagtttaacctttcttttcatagagcagttaggaaacactctgtttgtaaagtctgcaagtggatattcagacctccttgaggccttggttggaaacgggatttcttcatattctgcttgacagaagaattctcagtaacttccttgttttgtgtgtattcaactcacagagttgaacgatcctttacacagagcagacttgaaacactctttttgtggaatttgcaagtggagatttcagccgcgttgaggtcaatggtagaaaaggaaatatcttcgtataaaaactagacagaatgattctcagaaactcctttgtgatgtgtgcgttcaactcacagagtttaacctttcttttcatagagcagttgggaaacactgtttgtaaagtctgcaagtggatattcagacatccttgaggctttcgttggaaacgggatttcttcatattctgctagaaagaagaattctcagtaacttccttgtgttgtgtgtattcaactcacagagttgaacgatcctttacagagagcagacttgaaacactctttttgtggaatttgcaagtggagatttcagccgctttgaggtcaacggtagaaaaggaaatatcttcgtataaagactagacagaatgattctcagaaactcctttgtgatgtgtgcgttcaacacacagagtttaacttttcttttcatagagcagttaggaaatactctgtttgtaaagtctgcaagtggatattcagacctctttgaggccttcgttggaaacggaatttcttcatattatgctagacagaagaattctcagtaacttccttgtgttgtgtgtattcaactgacagagttgaactttcttttagagagagcagatttgaaacactgtttttgtggaatttgcaactggagatttcaagcgctttggggccaaaggcagaaaaggaaatatcttcgtataaaaactagacagaatcgttctcagaaactgctctgcgatgtgtgcgttcaactctcagagtttaacttttcttttcattcagcagtttggaaacactctgtttgtaaagtctgcacgtggataatttgaccacttagaggccttcgttggaaacgggtttttttcatgtaaggctagacagaataattcccagtaacttccttgtgttgtgtacattcaactcacagagttgaacgttcccttagagagagcagatttgaaactctctttttgtgaaattagcaagtggagatttcaagggctttaaggtcaatggcagaaaaggaaatatcttcgtttcaaaactagacagaatgattctcataaactcctttgtgatgtgtgcgttcaactcacagagtttaacctttctttccatagagcagttgggaaacactctgtttgtaatgtctgcaagtggatattcagacttccttgaggccttcgttggaaacgggatttcttcatattctgctagacagaagaattctcagtaacttccttgtgttgtgtgtattcaactcacagagttgaatgatcctttacacagagcagacttgaaacactctttttgtggaatttgcaagtggagatttcacccgctttgaggtcaacgggagaaaaggaaactatcttcgtataaagactagacagaatgattctcagaaactcctttgtgatgtgggcgttcaactcacagagtttaaccttccttttcatagagcagttaggaaacactctgtttgtaatgtctacacgtggatatttggatttctttgaggccttcgttggaaacgggattttttcatgtaaggctagacggaagaattctcagtaacttccttgtgttgtgtgtattcaactgacagagttgaactttcatttagagagagtagatttgaaacactgtttttgtggaatttgcaagtggagatttcaagcgctttggggccaaaggcagaaaaggaaatatcttcgtataaaaactagacagaatcattctcagaaaccgctctgtgatgtgtgcgttcaactctcagagtttaacttttctttccattcagcagtttggaaacactctgtttgtaaagtctgcacgtggatattttgaccacttagaggtcttcgttggaaacgggtttttttcatgtaaggctagacagaagaattcccagtaacttcccttgtgttgtgtgcattcaactcacagagatgaacgttcccttagacagagcagatttgaaacactctatttgtgcaatttgcaagtgtagatttcaagcgctttaaggtcaatggcagaaaaggaaatatcttcgtttcaaaactagacagaatcattcccacaaactgcgttgtgatgtgttcgttcaactcacagagtttaaactttctgttcatagagcagttaggaaacactctgtttgtaaagtctgtaagtggatattccgacatcttttggccttctttggaaacgggatttcttcatattctgctagacagaagaattctcagtaacttccttgtgttgtgtttattcaactcacagagttgaatgatcctttacacagagcagacttgaaacactctttttgtggaatttgcaagtggagatttcagccgctttgtggtcaatggtagaaaaggaaatatcttcctataaagactagacagaatgattctcagaaactcctttgtgatgtgttcgttcaactcacagagtttaacctttcttttcatagaggagttaggaaacactctgtttgtaaagtctgcaagtggatattcagacctctttgaggccttcgttggaaacgggtttttttcatataaggctagacagaagaattctcagtaacttcccttgtgttgtgtgtattcaactgacagagttgaactttcatttagagagagcagatttgaaactctgtttttgtggaatttgcaagtggagatttcaagcgctttggggccaaaggcagaaaaggaaatatcttcgtataaaaactagacagaatcattctcagaaactgctctgcgatgtgtgcgttcaactctcagagtttaacttttcttttcattcagcagtttggaaacactctgtttgtaaagtctgcacgtggataatttgaccacttagaggccttcgttggaaacgggtttttttcatgtaaggctatacagaagaattataagtaacttccttgtgttgtgtgtattcaactcacagagttgaacgatcctttacacagagcagacttgaaacactctttttgtggaatttgcaagtggagatttcagccgctgtgaggtcaatggtagaataggacatatcttcctatagaaactagacagaatgattctcagaaactcctttgtgatgtgtgcgttcaactcacacagtttaacctttcttttcatagagcagttaggaaacactctgtttgtaaagtctgcaagtggatatacagacctccttgaggcattcgttggaaacgggatttcttcatattatgctagacagaagaattctcagtaacttccttgtgttgtgtgtattcaactgacagagttgaactttcatttagagagagcagatttgaaacactgtttttgtggaatttgcaagtggagatttcaagcgctttggggccaaaggcagaaaaggaaatatcatcgtataaaaactagacagaatcattctcagaaactgctgagtgatgtgtgcgttcaactctcagagtttaacttttcttttcattcagcggtttggaaacactctgtttgtaaagtctgcacgtggatattttgaccacttagaggccttcgttggaaacgggtttttttcatgtaaggctagacagaagaattcccagtaacttccttgtgttgtgtacattcaactcacagagttgaacgttcccttagacagagcagatttgaaacagtctttttgtgcaattggcaagtggtgatttcagccgctttgtggtcaatggtataaaaggaaatatcttcgtataaaaactagacagaatcattcccacaaactgcgttgggatgtgttcgttcaactcacagagtttaacctttctgttcatagagcagttaggaaacactctgtttgtaaagtctgtaagtggatattctgacatcttgtggccttcgttggaaacgggatttcttcatattctgctagacagaagaattctcagtaacttccttgtgttgtgtgtattcaactcacagagttgaacgatcctttacacagagcagacttgaaacactctttttgtggaatttgcaagtggagatttcagccgcgttgaggtcaatggtagaaaaggaaataacttcgtataaaaactagacagaatgattctcagaaactcctttgtgatgtgtgcgttcaactcacagagtttaacttttcttttcatagagcagttaggaaacactctgtttgtaaagtctgcaagtggatattcagacctccttgaggccttcgttggaaacaggatttcttcatattctgctagacagaagaattctcagtaacttccttgtgttgtgtgtattcaactgacagagttgaactttcatttagagagagcagatttgaaacactgtttttgtggaatttgcaagtggagatttcaagcgctttggggccaaggacagaaaaggaaatatcttcgtataaaaactagacagaatcattctcagaaactgctgcgtgatgtgtgcgttcaactctcagagtttaacttttcttttcattcagcggtttggaaacactctgtttgtaaagtctgcacgtggatattttgaccacttagtggccttcgttggaaacgggttttttttcatgtaaggctagacagaagaattcccagtaacttccttgtgttgtgtacattcaactcacagagttgaacgttcccttagacagagcagatttgaaacactctttttgagaaattggcaagtggagatttcaagcgctttaaggtcaatggcagaaaaggaaatatcttcgtttcaaaactagacagaatcattcccacaaactgcgttgtgatgtgttcgttcaactcacagagtttaaccgttcttttcatagagcagttaggaaacactctgtttgtaaattctgtaagtggatattctgacatcttgtggccttcgttggaaacgggatttcttcatgttctgctagacagaagaattctcagtaacttccttttattgtgtgtattcaactcacagagttgaacgatcctttacacagagcagacttgaaacactctttttgtggaatttgcaagtggagatttcagccgctttgaggtcaatggtagaaaaggaaatatcttcgtataaaaattagacagaatgattctcagaaactcctttgtgatgtgtgcgttcaactcacagagtttaacctttcttttcatagagcagttaggaaacactctgtttgtaaagtctgcaagtggatattcagacctctttgaggccttcgttggaaacgggtttttttcatataagggtagacaaaagaattaccactaacatccttgtgttgtgtgtgttcaactcacagagttgaactttcatttacacagagcagatttgaaagactctttttgtggaatttgcaaatggagatttcaagcgctttgaggccaaagacagaaaaggaaatatcttcgtttcaaaactagacagaatcattctcagaaactgctctgcgatgtgtgcgttcaactctcagagtttaacttttcttttcattcagcagtttggaaacactctgtttgtaaagtctgcacgtggataacttgaccacttagaggccttcgttggaaacgggttttattcacgtaaggctagacagaagatttcccagtaaattccttgtgttgtgtacattcaactcacagagttgaacgttcccttagacagagcagatttgaaacactctttttgtgcaattgggaagtggagatttcaagcgctttaaggtcaatggcagaaaaggaaatatcttcgtttcaaaactacacagaatcattcccacaaactgcgttgtgatgtgttcgttcatctcacagagtttaacctttcttttcatagagcagttaggaaacagtctgtttgtaaattctgtaagtggatatcctgacatcttgtggccttcgttggaaacgggatttcttcatattctgctagacagaagaattctcagaaacttccttgtgttgtgtgtattcaactcacagagttgaacgatagtttacacagagcagacttgaaacactctttttgtggaatttgcaagtggagatttcagccgctttgaggtcaatgttagaaaaggaaatatcttcgtataaaaactagacagaatgattctcagaaacttctttgtgatgtgtgcgttcaactcacagagtttaacctttctgttcatagagcagttaggaaacactctgtttgtaaactctgcaagtggatattcagacctcctttgaggccttcgttggaaacgggatttctccatactgtgctagacagaagaattcccagtaacttccttctgttgtgtgtgttcaactcacagagttgaactttcatttacacagagcagatttgaaacactctttttgtggaatttgcaaatggagatttcaagcgctttgaggccaaaggcagaaaaggaaatatcttcgtttcaaaactagacagaatcattctcagaaactgctctgcgatgtgtgcgttcaactctcagagtttaacttttcttttcattcagcagtttggaaacactctgtttgtaaagtctgcacgtggataatttgaccacttagaggccttcgttggaaacggggttttttcatgtaaggctagacagaagaattctcagtaacttccttgtgttgtgtgtactcaactcacagagttgaacgatcctttacacagagaggacttgaaacactctttttgtggaatttgcaagtggagatttcagccgcgttgaggtcaatggtagaaaaggaaatatcttcgtataaaaactagacacaatgattctcagaaacgcctttgtgatgtgtgtgttcaactcacagagtttaacctttcttttcatagagcagttaggaaacactctgttggtaaagtctgcaagtggatattcagacctctttgaggccttcgttggaaacgggtttttttcatataaggctagacagaagaattctcagtaactttccttgtgttgtgtgtattcaactgacagagttgaactttcatttagagagagcagatttgaaacactgtttttgtggaatttgcaagtggagatttcagccgctttgaggtcaatagtagaaaaggaaatatcttcgtagaaaaactagacagaatgattctcagaaacttctttgtgatgtgtgcgttcaactcacagagtttaacctttcttttcatagagcagttaggaaacactctgtttgtaaactctgcaagtggatattcagacctctttgaggccttcgttggaaacaggatttcttcatactatgctagacagaagaattctcagtaacttccttgtgttgtgtgtattaaactcacagagttgaacgatcctttacacagagcagacttgaaacactctttttttggaatttgcaagtggagatttcagccgctttgaggtcaatggtagaataggaaatatcttcctatagaaactagacagaatgattctcagaaacttctttgtgatgtgtgcgttcaactcacagagtttaacctttctttacatagagcagttaggaaacactctgtttgtaaactctgcaattggatattcagacctctttgaggccttcgttggaaacgggatttcttcatactatgttagacagaagaattcccagtaactttccttgtgttgtgtgtattcaactcacagagttgaactttcatttacacagagcagattggaaacactctttttgtggaatttgcaagtggagatttcaagcgctttgaggccaaatgcagaaaaggaaatatcttcgtataaaaactagacagaatcattctcagaaactgctctgcgatgtgtgcgttcaactctcagagtttaacttttcttttcattcagcagtttggaaacactctgtttgtaacgtctgcacgtggatattttgaccacttagaggccttcgttggaaacgggtttttttcatataaggctagacagaagaattcccagtaacttccttgtgttgtgtacattcaattcacagatttgaaggttcccttagacacagcagatttgaaacactctttttgtgcaattggcaagtggagatttcaagcgctttaaggtcaatggcagaaaagggaatatcgtcgtttcaaaactagacagaatcattcccacaaactgcgttgtgatgtgttcgttcaactcacagagtttaacctttctcttcatagagcagttaggaaacactctgtaaagtctgtaagtggatattctgacatcttgtggccttcgttggaaacgggatttcttcatattctgctagacagaagaattcccagtaacttccttgtgttgtgtgtattcaactcacagagttgaacgatcctttacacagagcagacttgtaacactctttttctggaatttgcaagtggagatttcagccgctttgaagtcaaaggtagaaaaggaaatatcttcctataaaaactagacagaatgattctcagaaactcctttgtgatgtgtgtgttcaactcacagagtttaacctttcttttcatagagcagttaggaaacactctgtttgtaaagtctgcaagtggatattcagacctctttgagaccttcgttggaaacgggattttttcatataaggctagacagaagaattcccagtaacttccttgtgttgtgtgtgttcaactcacagagttgaactttcatttacacagagcagatttgaaacactctttttgtggaatttgcaaatggagatttcaagcgcattgaggccaaaggcagaaaaggaaatatcttcgtataaaaactagacagaatcattctcagaaactgctgcgtgatgcgtgcgttcaactctcaaagtttaacttttcttttcattcagcggtttggaaacactctgtttgtaaagtctgcacgtggatattttgaccacttagaggccttcgttggaaacgggtttttttcatgtaaggctagacagaagaattcccagtaacttccttgtgttgtgtacattcaactcacagagttgaacgttcccttagacagagcagatttgaaacactctttttgtgcaattggcaagtggtgatttcagcctctttgaggtcaatggtagaaaaggaaatatcttcgtataaaaactagacagaatcattcccacaaactgcgttgttatgtgttcgttcaactcacagagtttaacctttcttttcatagagcagttaggaaacagtctgtttgtaaattctgtaagtggatattctgacatcttgtggccttcgttggaaacgggatttcttcatattctgctagacagaataattctcagtaacttccttgtgttgtgtgtattcaactcacagagttgaacgatgctttacacagagcagacttgaaacattctttttgtggaatttgcaactggagatttcagccgctttgaggtcaatggtagaataggaaacatcttcctatagaaactagacagaatgattctcagaaactcctttgtgatgtgtgtgttcaactcacagagtttaacctttcttttcatagagcagttaggaaacactctgtttgtaaagtctgcaagtggatattcagacctctttgaggccttcgttggaaacgggttttttcatataaggctagacagaagaattcccagtaacttccttgtgttgtgtgtgttcaactcacagagttgaactttcatttacacagagcagatttgaaacactctttttgtggaatttgcaggtggagatttcaagcgctttgaggccaaaggcagaaaaggaaatatcttcatataaaaactagacagaatcattctcagaaactgctctgcgatgtgtgcgttcaactctcagagtttaacttttcttttcattcagcagtttggaaacaatctgtttgtaaagtctgcacgtggataacttgaccacttagaggacttcgttggaaacgggtttttttcctgtaaggctagacagaagaattcccagtaacttccttgtgttgtgtacattcaactcacagagttgaacgttcccttagacagagcagatttgaaacactctttttgtgcaattggcaaatggagatttcaagcgctttaaggtcaatggcagaaaaggaaatattcttcgtttcaaaactagacagaatcattcccacaaactgcgttgtgatgtgttcgttcaactcacagagtttaacctttctgttcatagagcagttaggaaacacactgtttgtaaagtctgtaagtggatattctgacatcttgtggccttcgttggaaacgggatttcttcatattctgctagacagaaagaattctcagtaacttccttgtgttgtgtgtattcaactcacagagttgaacgatcctttacacagagcagacttgaaacactctttttgtggaatttgcaagtggagatttcagccgctttgaggtcaatggtagaataggaaatatcttcctatagaaactagacagatgattctcagaaactcctttgtgatgtgtgcgttcaactcacagagtttaacctttcttttcatagagcagttaggaaacactctgtttgtaaagtctgcaggtggatattcagacatccttgaggctttcgttggaaacgggatttcttcatattctgctagaaagaagaattctcagtaacttcattgtgttgtgtgtattcaactcacagagttcaacgatcctttacacagagcagacttgaaacactctttttgtggaatttgcaagtggagatttcagccgctttgaggtcaatggtagaaaaggaaatatcttcctataaaaactagacagaatgattctcagaaactcctatgtgatgtgttcgttcagctcacagagtttaacctttcttttcatagagcagttaggaaacactctgtttgtaaagtctgcaagtggatatttagacctctttgaggccttcgttcgaaacgggatttcttcatattctgctagagagaagaattctcagtaacttcccttgtgttgtgtgtattcaactcacagagttgaacgatcctttacacagagcagacttgaaacactctttttgcggaatttgtaagtggagatttcagccgctttgaggtcaatggtagaaaaggaattatcttcgtataaaaactagacagaatgattctcagaaactcctttgtgatgtgtgcgttcaactcacagagtttaacctttcttttcatagagcagttaggaaacactctgtttgtacagtctgcaagtggatattcagacatccttgaggctttcgttggaaacgggatttcttcatattctgctagaaagaagaattctcagtaacttccttgtgttgtgtgtattcaactgacagagttgaactttcatttagagagagcagatttgaaacactgtttttgtggaatttgcaagtggagatttcaagcgctttggggccaaaggcagaaaaggaaatatcttcgtataaagactagacagaatgattctcagaaacttcattgtgatgtgtgcgttcaactcacagagtttaaccgttcttttcatagagcagttaggaaacactctgtttgtaaactctgcaagtggatattcagacctctttgaggccttcgttggaaacggtatttcttcatactgtgctagacagaagaatactcagtaacttccttgtgttgtgtgtattcaactcacagagttgaacgatggtttacacagagcagatttgaaacactctttttgtggaattagcaattggagatttcagccgctttgaggtcaatggtagaaaaggaaatatcttcgtataaaaactagacagaatgattctcagaaactcctttgtgatgtgtgcgttcaactcacagagtttaacctttcttttcatagagcagttaggaaacactctgtttgtaaagtctgcaagtggatattcagacctctttgaggccttcgttggaaacgggtttttttcatataagtctagacagaagaattcccagtaacttccttgtgttgtgtgtgttcaaatcacagagttgaactttcatttacacagagcagatttgaaacactctttttgtggaatttgcaagtggagatttcaagcgctttggggccaaaggcagaaaaggaaatatcttcgtttcaaaactagacagaatcattctcagaaactgctgcgtgatgtgtgcgttcaactctcagagtttaacttttcttttcattcagcggtttggaaacactctgtttgtaaagtctgcacgtggaaattttgaccactcagaggccttcgttggaaacgggtttttttcatgtaaggctagacagaagaattccaagtaacttccttgtgttgtgtgcattcaactcacagagttgaacgttcccttagacagagcagatttgaaacactctatttgtgcaatttgcaagtgtagatttcaagcgctttaaggtcaatggcagaaaaggaaatatcttcgtttcaaaactagacagaatcattcccacaaactgcgttgtgatgtgttcgttcaactcacagagtttaacctttctgttcatagagcagttaggaaacactctgtttgtaaagtctgaaagtgcatattctgacatcttgtggccttcgttggaaacgggatttcttcatattctgctagatagaagaattctcagtaacttccttgtgttgtgtgtattcaactcacagagttgaacgatccctttacacagagcagacttgaaacactctttttgtggaatttgcaagtggagatttcagccgctttgaggtcaatagtcgaaaaggaaatatcttcgtagaaaaactagacagaacgattctcagaaactcctttgtgatgtgtgcgttcaactcacagagtttaacctttcttttcatagagcagttaggaaacactctgtttgtaaagtctgcaagtggatattcagacctctttgaggccttcattggaaacgggatttcttcatattctgctagacagaagaattcccagtaacttccttgtgttgtgtgtgttcaactcacagagttgaactttgatttacacagagcagatttgaaacactctttttgtggaatttgcaagtggagatttcaagcgctgtgaggccaaaggcagaaaaggaaatatcttcgtataaaaactagacagaatcattctcagaaactgctctgcgatgtgtgcgttgaactctcagagtttaacttttcttttcattcagcagtttggaaacactctgtttgtaaagtctgcacgtggatattttcaccacttagaggccttcgttggaaacgggtttttttcctgtaaggctagacagaagaattcccagtaacttccttgtgttgtgtgcattcaactcacagagttgaacgttcccttagacagagcagatttgaaacactctctttgtgcaatttgcaagtgtagatttcaagcgctttaaggtcaacggcagaaaaggaaatatcttcgtttcaaaactagacagaatcattcccacaaacttcgttgtgatgtgttcgttcaactcacagagtttaaccttcctgttcatagagcagttaggaaacactctgtttgtaaagtctgtaagtggatattctgacatcttgtggccttcgttggaaacgggatttcttcatattctgctagacagaagaattctcagtaacttccttgtgttgtgtgtattcaactcacagagttgaacgatcctttacacagagcagacttgaaacactctttttgtggaatttgcaagtggagatttcagccgcgttgaggtcaatggtagaaaaggaaatatcttcatataaaaactagacagaatgattctcagaaactcctttgtgatgtgtgtgttcaactcacacagtttaacctttcttttcatagagcagttagtaaacactctgtttataaagtctgcaagtggatattcagacccctttgaggccttcgttggaaacgggatttcttcatattatgctagacagaagaattcccagtaacttccttgtgttgtgtgtgttcaactcacagagttgaactttcatttacccagagcagatttgaaacactctttttgtggaatttgcaagtggagatttcaagcgctttgaggccaaaggcagaaaaggtaatatcttcgtataaaaactagacagaacgattctcagaaactcctttgtgatgtgtgcgttcaactcacagagtttaacttttcttttcatagagccattaggaaacactctgtttgtaaagtctgcaagtggatactcagacctctttgaggccttcgttggaaacgggtttttttcatgtaaggctagacagaagaattcccagtaacttccttgtgttgtgtgcattcaactcacagagttgaacgttcccttagacagagcagatttgaaacactctatttgtgcaatttgcaagtatagatttcaagcgctttcaggtcaacggcagaaaaggaaatatcttcgtttcaaaactagacagaatcattcccaaaaactgcgttgtgatgtgttcgttcatctcacagagtttaacctttcttttcatagagcagttaggaaacagtctgtttgtaaattctgtaagtggatattctgacatcttgtggccttcgatggaaacgggatttcttcatattctgctagacagaagaattctcagtaacttccttgtgttgtgtgtattcaactcacagagttgaacgatcctttacacagagcagacttgaaacattctttttgtggaatttggaagtggagatttcagccgctttgaggtcaatggtagaatagggaatatcttcctatagaaactagacagaatgattcccacaaaatcctttgtgatgtgtgtgttcaactcacagagtttaacctttcttttcatagagcagttagtaaacactctgtttataaagtctgcaagtggatattcagacccctttgaggccttcgttggaaacgggatttcttcatattatgctagacagaagaattctcagtaacttccttgtgttgtgtgtattcaactgacagagttgaactttcatttagagagagcagatttgaaacactgtttttgtggaatttgcaagtggagatttcaagcgctttggggtcaaaggcagacaacgaaatatcttcgtataaaaactagacagaatcatgctcagaaactgctctgcgatgtgtgccttcagctctcagagtttaacttttcttttcattcagcagtttggaaacactctgtttgtaaagcctgcacgtggatattttgaccacttagaggtcttcgttggaaacgggtttttgtcatgtaaggctagacagaagaattaccagtaacttccttgtgttgtgtgcattcaactcacagagatgaacgttcccttagacagagcagatttgaaacactctatttgtgcaatttgcaagtgtagatttcaagcgcttaaaggtcaatggtagaaaaggaaatatcttcgtttcaaaactagacagaatcattcccacaaactgcgttgtgatgtgttcgttcaactcacagagtttaacctttctgttcatagagcagttaggaaacactctgtttgtaaagtctgtaagtggatattctgacatcttgtggccttcgttggaaacgggatttcttcgtattgtgctagacagaagaattctcagtaacttccttgtgttgtgtgtattcaactcacagagttgaacgatcctttacacagagcggacttgtaacattctttttgtggaatttgcaagtggagatttcagccgctttgaagtcaaaggtagaaaaggaaatatcttcctataaaaactagacagaatgattctcagaaactcctttgtgatgtgtgcattcaactcacagagtttaacctttcttttcatagaacagttaggaaacactctgtttgtaaagtcttcaggtggatattcagacctcttagaggccttcgttggaaacaggatttcttcatataatgctagacagaagaattctcagtaacttcattgtattgtgtgtattcaactcacagatttcaacgatcctttacacagagcagacttgaaacactctttttctggaatttgcaagtggagatttcagccgctttgaggtcaatggtagaataggaaatatcttcctatagaaactagacagaatgattctcagaaactcctttgtgatgtgtgcgttcaactcacagagtttaacctttcttttcatagagcagttaggaaacactctgtttgtagagtctgcaagttgatattcagacctccttgaggccttcgttggaaacgggatttcttcatattatgctagacagaagaattcccagtaacttccttgtgttgtgtacattcaactcacagagttgaacgttcccttagacagagcagacttgtaacacactttttgtggaatttgcaagtggagatttcagccgctttgaagtcaaaggtagaaaaggaaatatcttcctataaaaactagacagaatgattctcagaaactcctttgtgatgtgtgcgttcaactcacagagtttaacctttcttttcatagaggagttaggaaacactctgtttgtaaagtctgcaagtggatattcagacctccttgaggcctttgttggaaacgggatttcttcatatcctgctagacagaagaattctcagtaacttccttgtgttgtgtgtattcaactcacagagttgaacgatcctttacagagagcagacttgaaacactctttttgtggaatttgcaagtggagatttcagccgctttgagatcaatggtagaataggaaatatcttcctatagaaactagacagaatcattctcaaaaactgctgcgtgatgtttgcgttcaactctcagagtttaacttttcttttcattcagcggtttggaaacactctgtttgtaaagtctgcacgtggatattttgaccacttagaggccttcgttggaaacgggtttttttcatgtaaggctagacagaagaattcccagtaacttccttgtgttgtgtgcattcaactcacagagttgaacgtttccttagacagagcagatttgaaacactctatttgtgcaatttgcaagtgtagatttcaagcgctttaaggtcaatggcagaaaaggaaatatcttcgtttcaaaactagacagaatcattcccaaaaactgcgttgtgatgtgttcgttcaactcacagagtttaacctttctgttcatagagcagttaggaaacactctgtttgtaaagtctgtaagtagatattctgacatcttgtggccttcgttggaaacgggatttcttcatattctgctagacagaaagaattctcagtaacttccttgtgttgtgtgtattcaactcacagagttgaacgatcctttacacagagcagacttgaaacactctatttgtggaatttgcaagtggagatttcagccgctttgaggtcaatgatagaaaaggaaatatcttcgtataaaaactagacagaatgattctcataaactcctttgtgaagtgtgcgttcaactcacagagtttaacctttcttttcatagagcagttaggaaacactctgtttgttaagtctgtaagtggatattcagacctccttgaggccttcgttggaaacgggatttcttcatattatgctagacagaagaattctcagaatcttccttgtgttgtgtgtattcaactcacagagttgaacgatggtttacacagagcagatttgaaacactctttttgtggaatttgcaagtggagatttcagccgctttgaggtcaatggtagaaaatgaaatatccttcgtataaaaactagacagaatgattctcagaaaatcttttgtgatgtgtgcgttcaactcacagagtttaacttttcttctcatagagcagttaggaaacactctgtttgtaaagtctgcaagtggatattcagacctccttgaggccttcgttggaaacgggatttcttcatattatgctaaacagaagaattcccagtaacttccttgtgttgtgtgtattcaactcacagagttgaactttcatttacacagagcagattggaaacactctttttgtggaatttgcaagtggagatttcaagcgctttgaggccaaaggcagaaaaggaaatatcttcgtataaaaactagacagaatcattctcagaaactgctctgcgatgtgtgccttcagcgctcagagtttaacttttcttttcattcagcagtttggaaacactctgtttgtaaagtctgcacgtggatattttgaccacttagaggccttcgttgcaagcgggtttttgtcatgtaaggttagacagaagaattcccagtaacttccttgtgttgtatacattcaactcacagagttgaacgttcccttagacagagcagatttgaaacactctttttgtgcaattggcaagtggagatttcaagcgctttgaggtcaatggcagaaaaggaaatatcttcgtttcaaaactagacagaatgattctcagaaactcctttgtgatgtgtgcgttcaactcacagagtttaacctttctattcatagagcagttaggaaacactctgtttgtaaagtctgcaagtggatattcagacatccttgaggctttcgttggaaacgggatttcttcatattctgctagaaagaagaattctcagaaacttccttgtgttgtgtgtattcaactcacagagttgaacgatcctttacacagagcagacttgaaacactctttttgtggaatttgcaagtggagatttcagccgctttgaggtcaatggtagaaaaggaaatatcttcgtataaaaactagacagaatgattctcagaaactcctttgagatgtgtgtgttcaactcacagagtttaacccttcttttcatagagcagttaggaaacactctgtttgtaaagtctgcaagtggatattcagacctctttgaggccttcgttggaaaccggatttcttcatactgtgctagacagaagaattcccagtaacttccttgtgttgtgtgtgttcaactcacagagttgaacttccatttacacagagcagatttgaaacactctttttgtggaatttgcaagtggagatttcaagcactttgaggccaaaggcagaaaaggaaatatcttcgtttcaaaactagacagaatgattctcagaaactcctttgtgatgtgtgcgttcaactcacagagtttaacctttcttttcatagagcagttaggaaacactctggttgtaaagtctgcaagtggatattttgaccacttagaggccttcgttggaaacgggttttttttcatgtaagactagacagaagaattctcagaaacttccttgtgttgtgtgttttcaactcacagagttgaacgatgctttacacagagtagacttgaaacactctttttgtggaatttgcaagtggagatttcagccgctttgaggtcaatggtagaaaaggaaatatctttgtataaaaactagacagaatgattctcagaaactcctttgtgatgtgtgcgttcaactcacagagtttaacctttcttttcatagagcagttaggaaacactctgtttgtaaagtgtgcaagtggatattcagacctctttgaggccttcgttggaaacgggatttcttcatattctgctagagagaagaattctcagtaacttccttgtgatgtgtgtattcaactcacagagttcaacgatcctttacacagagcagacttgaaacactctttttgtggaatttgcaagtggagatttcagccgctttgaggtcaatggtagaataggaaatatcttcctatagaaactagacagaatgattctcagaaactcctttgtgatgtgtgtgttcaactcacagagtttaacctttcttttcatagagcagttagtaaacactctatttataaagtctgcaattggatattcagacccctttgaggccttcgttggaaacgggatttcttcatattatgttagacagaagaattcccagtaacttccttgtgttgtgtgtgttcaactcacagagttgaactttcatttccacagagcagatttgaaacactctttttgtggaatttgcaaatggagatttcaagcgctttgaggccaaaggcagaaaaggatatatcttcgtataaaaactagacagaatcattctcagaaactgctctgcgatgtgtgcgttcaactctcagagtttaacttttcttttcattcagcagtttcgaaacactctgtttgtaaagtctgcacgtggataatttgaccacttagaggccttcgttggaaacgggtttttttcatgtaaggatagacagaagaattcccagtaacttccttgtgttgtgtacattcaactcacagagttgaacgttcccttagacagagcagatttgaaacactctttttgtgcaactggcaagtggagatttcaagcgctttgaggtcaatggcagaaaaggaaatatcttcgtttcaaaactagacagaatcattcccacaaactgcgttgtgatgtgttcgttcaactcacagactttaacctttcttttcatagagcagttaggaaacagtctgtttgtaaattctgtaagtggatattctgacatcttgtggccttcgttggaaacgggatttcttcatattctgctagacagaagaattctcagtaacttccttgtgttgtgtgtattcaactcacagagttgaacgatcccttacacagagcagacttgaaacactctttttgtggaatttgcaagtggagatttcagccgctttgaggtcaatggtagaaaaggaaatatcttcgtataaaaactagacagaatgattctcagaaactcctttgtgatgtgtgtgttcaactcacagaatttaacctttcttttcatagagcagttagtaaacactctgtttataaagtctgcaagtggatattcagacccctttgaggccttcgttggaaacgggatttcttcatattatgctagacagaagaattctcagtaacttccctgtgttgtgtgtattcaactcacagagttgaacgatcctttacagagagcagacttgaaacactctttttgtggaatttgcaagtggagatttcagccgctttgaggtcaatggtagaataggaaatatcttcctatagaaactagacagaatgattctcagaaactcctttgtgatgtgtgcgttcaactcacagagtttaacctttcttttcatagagcagttaggacacactctgtttgtaaagtctgcaagtggatattcagacctctttgaggccttcgttggaaacgggatttcttcatattatgctagacagaagaattctcagtcacttccttgtgttgtgtgtattcaactgacagagttgaactttcatttagagagagcagatttgaaacactgtttttgtggaatttgcaagtggagatttcaagcgctttggggccaaaggcagaaaaggatatatcttcgtataaaaactggacagaatcattctcagaaactgctctgcgatgtgtgcgttcaactctcagagtttaacttttcttttcattcagcagtttggaaacactctgtttgtaaagtctgctcgttgataatttgaccacttagaggccttcgttggaaacgggtttttttcatataaggctagacagaagaattcccagtaacttccttgtgttgtgtgcattcaactcacagagttgaacgttcccttagacagagcagatttgaaacactctatttgtgcaatttgcaagtgtagatttcaagcgctttcaggtcaatggcagaaaaggaaatatcttcgtttcaaaactagacagaatcattcccacaaactgcgttgtgatgtgttcgttcaactcacagagtttaacctttcttttcatagagcagttaggaaacagtctgtttgtcaattctgtaagtggatattctgacatcttgtggccttcgttggaaacgggttttcttcatattctgctagacagaagaattctcagtaacttccttgtgttgtgtgtattcaactcacagagttcaacgatgctttacacagagtagattgaaacacacttttttttgaatttgcaagtggagatttcagccgctttgaggtcaatggtagaataggaaatatcttcctatagaaactagacagaatgattctcagaaacttctttgtgatgtgtgcgctcaactcacagagtttaacctttcttttcatagagcatttaggaaacactctgtttgtaaagtctgcaagtggatattcagacctctttgaggccttcgtaggaaacgggatttcttcatattatgctagacagaagaattcccagtaacatccttgtgttgtgtgtgttcaactcacagagttgaactttcatttacacagatcagatttgaaagactctttttgtggaatttgcaaatggagatttcaagcgctttgaggccaaaggcagaaaaggaaatatcttcgtataaaaactagacagaatcattctcagaaactgctctgcgatgtgtgcgttcaactgtcagagtttaacttttcttttcattcagcagtttggaaacactctggttgtaaagtctgcacgtggatattttgaccacttagaggccttcgttggaaacgggtttttttcctgtaaggctagacagaagatttcccagtaatttccttgtgttgtgtgcttcaactcacagaattgaacgttccgttagacagagcagatttgaaacactctatttgtgcaatttgcaagtgtagatttcaagcgctttaaggtcgttggcagaaaaggaaatatcttcgtttcaaaagtagacagaatgattctcagaaacttcattgtgatgtgtgtgttcaactcacagagtttaacctttcttttcatagagcagttgggaaacagtctgtttgtaaattctgtaagtggatattctgacatcttgtggccttcgttggaaacgggatttcttcatattctgctagacagaagaattctcagtaacttccttgtgttgtgtgtattcaacccacagagttgaacgatcctttacacagagcagacttgaaacactctttttctggaatttgcaagtggagatttcagccgctttgaggtcaatggtagaataggaaatatcttcctatagaaactagacagaatgattctcataaactactttgtgatgtgtgcgttcaactcacagagtttaacctttcttttcatagagcagttaggaaacactctgtttgtaaagtctgcaagtggatattcagacctctttgaggccttcgttggaaacgggatttcttcatattctgctagacagaagaattctcagtaacttccttgtgttgtgtgtattcaactcacagagttgaacgatcctttacacagagcattcttgaaacactctttttgtggaatttgcaagtggagatttcagccgctttgaggtcaatagtagaaaaggaaatatcttcgtagaaaaactagacagaaatcattctcagaaactgctgcgtgatgtgtgcgttcaactctcagagtttaacttttcttttcattcagcggtttggaaacactctgtttgtaaagtctgcaagtggatattttgaccacttagaggccttcgttggaaacgggtttttttcatgtaaggctagacagaagaattcccagtaacttccttgtgttgtgtgcattcaactcacagagttgaacgttcccttagacagagcagatttgaaacactctatttgtgcaatttgcaagtgtagatttcaagcgctttaaggtcaatggcagaaaaggaaatgtcttcgtttcaaaactagacagaatgattctcagaaacttcattgtgatgtgtgcgttcaactcacagagtttaacctttcttttcatagagcagttaggaaacactctgtttgtaaactctgcaagtggatattcagacctctttgctgccttcgttggaaacgggatttcttcatactgtgctagacagaagaattctcagtaacttccttgtgttgtgtgtatttaactcacaaaattgaacgatcctttacacagagcggacttgaaacactctttttgtgtaatttgcaagtggagatttcagccgcgttgaggtcaacggtagaaaaggaaatatcttcgtataaaaactagacagaatgattctcagaaactgctttgtgatgtgtgcgttcaactcacagagttcaacctttcttttcatagagcagttgggaaacactctgtttttaagtctgcaagtggatattcagacttctttgaggccttcgttggaagcgggatttcttcatgttctgctagacagaggaattcccagtaacttccttgtgctgtgtgtgttcaactcacagagttgaactttcatttacacagagcagatttgaaacactctttttgtggaatttgcaaatggagatttcaagcgctttgaggccaaaggcagaaaaggaaatatcttcgtttcaaaactagacagaatcattctcagaaactgctctgcgatgtgtgccttcaactctcagagtttaacttttcttttcattcagcagtttggaaacactctgtttgtaaagtctgcacgtggatattttgaccacttagaggccttcgttggaatcgggtttttttcctctaaggctagacagaagaattctcagaaacttccttgtgttgtgtgtattcaactcacagagttgaacgatcgtttacacagagcagacttgagacactctttttgtggaatttgtaagtggagatttcagccgctttgaggtcaatggtagaaatggaaatatcttcatataaaaactagacagaatcattcccacaaactgcgttgtgatgtgttcgttcaactcacagactttaacctttctgttcatagagcagttaggaaacactctgtttgtaaagtctgcaagtggatattcagacctccttgaggccttcgttggaaacgggatttcttcatattctgctagacagaagaattcccagtaacttccttgtgttgtgtgtgttcaactcacagagttgaactttcatttacacagcgcagatttgaaacactctttttgtggaatttgcaagtggagatttcaagcgctttgaggccaaaggcagaaaaggaaatatcttcgtataaaaactagacagaatcattctcagaaactgctgcgtgatgtgtgcgttcaactctcagagtttaactttgcttttcattcagcggtttggaaacactctgtttgtaaagtctgcacgtggatattttgaccacttagtggccttcgttggaaacgggtttttttcatgtaaggctagacagaagaattcccagtaacttccttgtgttgtgtacattcaactcacagagttgaacgttcccttagacagagcagatttgaaacactctttttgtgcaattggcaagtggagatttcaagcgctttgaggtcaatggcagaaaaggaaatatcttcgtttcaaaactagacagaatgattctcataaactcctttttgatgtgtgcgttcaacacacagagtttaacctttctgttcatagagcagttcggaaacactctgtttgtaaagtttgtaagtggatattctgacatcttgtggccttcgttggaaacgggatttcttcatattctgctagacagaagaattctcagaaacttccttgtgttgtgtgtattcaactcacagagttgaatgatcctttacacagagcagacttgaaacactctttttgtggaatttgcaagtggagatttcagccgctttgtggtcaatggtagaaaaggaaatatcttcgtataaagactagacagaatgattctgagaaactcctttgtgatgtgtgcgttcaactcacacagtttaacctttcttttcatagagcagttaggaaacactctgtttgtaaagtctgcaagtggatattcagacctccttgaggctttcgttggaaacgggatttcttcatattctgctagaaagaagaattctcagtaactgccttgtgttgtgtgtattcaactcacagagttgaacgatcctttacacagagcagacttgaaatactctttttgtggaatttgcaagtggagatttcagccgctttgaggtcaatggtagaataggaaatatcttcctatagaaactagacagaatgattctcagaaactcctttgtgatgtgtacgttcaactcacagagtttaacctttcttttcatagagcagttaggaaacactctgtttgtaaagtctgcaagtggatattcagacatctttgaggctttctttggaaacgggatttcttcatattctgctatacagaagaattctcagaaacttccttgtgttgtgtgttttcaactcacagagttcaacgatcctttacacagagtagacttgaaacactgtttttgtggaattggcaagtggagatttcagccgctatgaggtcaatggtagaaaaggaaatatcttcgtataaaaactagacagaatgattctcagaaactcctttgtgatgtgtgcgttcaactcacagagtttaacctttcttttcatagagcagttgggaaacactctttttgtaaagtctgcaagtggatattcagacatccttgaggctttccttggaaacgggatttcttcatattctgctagaaagaagaattctcagtaacttccttgtgttgtgtgtattcaactcacagagttgaatgatcctttacaaagaacagtcttgaaacactctttttgtggaatttgcaagtggagatttcagccgctttgaggtcaatggtagaataggaaatatcttcttatagaaactagacagaatgattctcagaaactactttgtgatgtgtgtgttcaactcacagagtttaacctttcttttcatagagcagttagtaaacactctgtttataaagtctgcaagtggatattccgacccctttgaggccttcgttggaaacgggatttcttcatattatgctagacagaagaattctcagtaacttccttgtgttgtgtgtattcaagtgacagagttgaactttcatttagagagagcagatttgaaacactgtttttgtggaatttgcaagtggagatttcaagcgctttggggccaaaggcagaaaaggaaatatcttcgtatataaactagacagaatgattctcagaaactcctttgtgatgtgtgcattcaactcacagagtttaaccattcttttcatagagcagttaggaaacactctgtttgtaaagactgcaagtggatattcagacctccttgaggccttcgttggaaacgggacttcttcatattatgctacacagaagaattctcagtaacttccttgtgttgtgtgtattcaactcacagagttgaacgatcctttacacagaacatacttgaaacactctttttgtggaatttgcaagtggagatttcagccgctttgaggtcaatggtagaataggaaatatcttcctatagaaactagacagaatgattctcagaaactcctttgtgaagtgtgcgttcaactcacagagtttaacctttctgttcatagagcagttaggaaacactctgtttgtaaagtctgcaagtggatattcagacctccttgaggccttcgttggaaacgggatttcttcatattctgctagacagaagaattctcagtaacttccttgtgttgtgtgtattcaactgagagagttgaactatcatttagagacagcagatttgaaacactgtttttgtggaatttgcaagtggagatttcaagcgctttggggccaaaggcagaaaaggaaatatcttcgtataaaaactagacagaatgattctcagaaactcctttgtgatgtgtgcgttcaactcacagagtttaacctttcttttcatagagcagttaggaaacactctgtttgtaaagtctgcacgtggatattttgaccacttagaggccttcgttggaaacgggttttcttcctgtaaggctagacagaagaattcccagtaacttccttgtgttgtgtacattcaactcacagagttgaacgttcccttagacagagcagatttgaaacactctttttgtgcaattggcaaatggagatttcaagcgctttaaggtcaatggcagaaaaggaaatatcttcgtttcaaaaatagacagaatcattcccacaaactgcgttgtgatgtgttcgttcaactcacagagtttaacctttctgttcatagagcagttaggaaacactctgtttgtaaagtctgtaactggatattctgacattttgtggccttcgttggaaacgggatttcttcatattctgctagacagaagaattctcagtaactgccttgtgttgtgtgtattcaactcacagagttgaacgatccttaacacagagcagacttgaaacactctttttgtggaacttgcaagtggagatttcagccgctttgaggtcaatggtagaataggaaatatcttcctatagaaactagacagaatgattctcataaactcctttgtgatgtgtgcgttcaactcacagagtttaacctttctgttcatagagcagttaggaaacactctgtttgtaaagtctgcaagtggatattcagaactccttgaggccttcgttggaaacgggatttcttcatattctgctagacagaagaattctcagtaacttccttgtgttgtgtgtattcaactcacagagttgaacgatcctttacacagagcagacttgaaacactctttttgtggaatttgcaaggggagatttcagccgctttgagttcaatggtagaataggaaatatcttcctatagaaactagacagaatgattctcagaaactcctttgtgatgtgtgccttcaactcacagagtttaacctttcttttcatagagcagttaggaaacactctgtttgtaaagtctgcaagtggatattcagacctctttgaggccttcgttggaaacgggatttcttcatactatgctagacagaagaattctcagtaacttccttgtgttgtgtgtattcaactcacagagttgaacgatcctttacacagagcagacttgaaacactctttttgtggaatttgcaaggggggatttctgccgctttgaggtcaatggtagaataggaaatatcttcctatagaaactagacagaacgattctcagaaactcctttgtgatgtgagcgttcaactcacagagtttaacctttcttttcatagagcagttaggaaacactctgtttgtaaagtctgcaagtggatattcagacctctttgaggccttctttggaaacgggatttcttcatattctgctagacagaagaattctcagtaacttccttgtgttgtgtgtattcaactgacagagttgaactttcatttagagagagcagatttgaaacactgtttttgtggaatttgcaagtggagatttcaagcgctttggggccaaaggcaaaaaaggaaatatcttcgtataaaaactagacagaatcattctcagaaactgctctgcgatgtgtgcgttcaactctcagagtttaacttttcttttcattcagcagtttggaaacactctgtttgtaaagtctgcacgtggatattttgaccacttagaggtcttcgttggaaacgggtttttttcctgtaaggcttgacagaagaattcccagtaacttccttgtgttgtgtgcattcaactcacagagttgaaagttcccttagacagagcagatttgaaacactctatttgtgcaatttgcaagtgtagatttcaagcgctttaaggtcaatggcagaaaaggaaatatcttcgtttcaaagctagacagaatcattcccacaaactgcgttgtgatgtgtgcgttcaactcaaagagtttaacctttcttttcatagagcagttaggaaacactctgtttgtaaagtcttcaagtggatattcagacctccttgaggccttcgttggaaacgggatttcttcatattctgctagacagaagaattctcagtaacttccttgtgttgtgtgtattcaactcacagagttgaacgatcctttacacagagcagacttgaaacactctttttctggaatttgcaagtggagatttcagccgctttgaggtcaattgtagaataggaaatatcttcctatagaaactagacagaatgattctcagaaacacttttgtgatgtgtgcgttcaactcacagagtttaacctttcttttcatagagcagttaggaaacactctgtttgtaaagtctgcaagtggatattcagacctctttgaggccttcgttggaaacgggatttcttcatattctgctagacagaaggattcccagtaacttccttgtgttgtgtgtgttcaactcacagagttgaactttcatttacaaagagcagatttgaaacactctttttgtggaatttgcaattggagatttcaagcgctttgaggccaaaggcagaaaaggaaatatcttcgtataaaaactagacagaatcattctcagaaactgctctgcgatgtgtgcgttcaactctcagagtttaacttttgttttcattcagcagtttggaaacactctgtttgtaaagtctgcacgtggataatttgaccacttagagttcttcgttggaaacgggtttttttcatgtaaggctagacagaagaattctcagtaacttccttgtgttgtgtgtattcaactcacagagttgaacgatcctttacacagagcagacttgtaacactctttttgtggaatttgcaagtggagatttcagccgctttgaagtcgaaggtacaaaaggaaatatcttcctataaaaactagacagaatgattctcagaaactcctttgtgatgtgtgcgttcaactcacagagtttaacctttcttttcatagagcagttaggaaacactctgtttgtaaagtctgcaagtggatattcagacatccttgaggctttcgttggaaacgggatttcttcatgttctgctagaaagaagaattctcaataacttccttgtgttgtgtgtattcaactgacagagttgaaccttccttcagatagagcagatttgaaacactctttttgtgtaatttgcaagtggagatttcaagcgctttgaggccaaaggcagaaaaggaaatatcttcgtataaaaactagacagaatcattcccacaaactgcgttgtgatgtgttcgttcaactcacagagtttaacctttcttttcatagagcagttaggaaacagtctgtttgtaaattctgtaagtggatattctgacatcttgcggccttcgttggaaacgggatttcttcatattctgctagacagaagaattcccagtaacttccttgtgttttgtacattcaacccacagagttgaacgtttccttagacagagcagatttgaaacactctttttgtgcaattggcaagtggtgatttcaaccactttcaggtcaaaggtagaaaaggaaatatcttcctataaaaactagacagaatcattcccacaaactgcgttgtgatgtgttccttcaactcacagagtttaacgtttccgttcatagagcagttaggaaacacactgtttgtaaagtctgtaagtggatattctgacatcttgtggccttcgttggaaacgggatttcttcatattctgctagacagaagaattctcagtaacttccttgtgttgtgtgtattcaactcacagagttgaatgatcctttacacagagcagacttgaaacgctctttttgtggaatttgcaagtggagatttcagccgcgttgaggtcaatggtagaaaaggaaatatcttcgtataaaaactagacagaatgattctcagaaacttctttgtgatgtgtgcgctcaactcacagagtttaacttttcttttcatagagcagttaggaaacactctgtttgtaaactctgcaagtggatattcagacctctttgaggccttcgttggaaacgggatttcttcatattatgcctgagagaagaattctcagtaacttccttgtgttgtgtgcattcaactcacagagttgaacgttcccttagacagagcagatttgaaacactctatttgtgcaatttgcaagtgtagatttcaagcgctttgaggccaacggcagaaaaggaaatatcttcgtagaaaaaatagacggaaatcattcccacaaactgcgttgtgatgtgttcgttcatctcacagagtttaagctttcttttcatagagcagttaggaaacactctgtttgtaaattctgtaagtggatattctgacatcttgtggccttcgttggaaacgggatttcttcatattctactagacagaagaattcccagtaacttccttgtgttgtgtacattcaactcacagagttgaacgttcccttagacagagcagatttgaaacactctttttgtgcaattggcaagtggagatttcaagcgctttgaggtcaatggcagaaaaggaaatatcttcgtttcaaaactagacagaatcattcccacaaactgcgttgtgatgtgttcgttcaactcacagagtttaacctttcttttcatagagcagttaggaaacagtctgtttgtgaattctgtaagtggatattctgacatcttgtggccttcgttggaaacgggatttcttcatattctgctagacagaagaattctcagaaacttccttgtgttgtgtgtattcaactcacagagttgaacgatcctttacagagagcagacttgaaacactctttttgtggaatttgcaagtggagatttcagccgctttgaggtcaatggtagaataggaaatatcttcctatagaaactagacagaatgattctcagaaactcctttgtgatgtgtgcgttcatctcacagagtttaacttttcttttcatggagcagttaggaaacactctgtttgtaaagtctgcaagtggatattcagacctctttgaggccttcgttggaaacgggatttcttcgtattctgctagacagaggattcccagtaacttccttgtgttgtgtgtgttcaactcacagagttgaactttcatttacaaagagcagatttgaaacactctttttgtggaatttgcaagtggagatttcaagcgctttgaggccaaaggcagaaaaggaaatatcttcgtataaaaactagacagaatcattctcagaaactgctgcgtgacgtgtgcgttcaactctcagagtttaacttttcttttcattcagcggtttggaaacactctgtttgtaaagtctgcacgtggatattttgaccacttagaggccttcgttggaaacgggtttttttcatgtaaggctagacagaagaattcccagtaacttccttgtgttgtgtgcattcaactcacagagttgaacgttcccttagacagagcagatttgaaacactctatttgtgcaatttgcaagtgtagatttcaagcgctttaaggtcaatggcagaaaagaaaatatcttcgtttcaaaactagacagaatcattcccacaaactgcgttgtgatgtgttcgttcaactcacagagtttaaccattcttttcatagagcagttaggaaacagtctgtttgtcaattctgtaagtggatattctgacatcttgtggccttcgttggaaacgggatttcttcatattctgctagacagaagaattctcagaatcttccttgtgttgtgtgtattcaactcacagagttgaacgatccttcacacagagcagacttgaaacactctttttgtggaatttgcaagtggagatttcagccgctttgaggtccatggtagaaaaggaaatatcttcgtataaaaactagacagaatgattctcagaaactcctttgtgatgtgtgcgttcaactcacagagtttaacctttctgttcatagagctgttaggaaacactctgtttgtaaagtctgcaagtgggtattcagacctccttgaggccttcgttggaaacgggatttcttcatattttgctagacagaagaattctcagtaacttccttgtgttgtgtgtattcaactgacagagttgaactttcatttagagagagcagttttgaaacactgtttttgtggaatttgcaagtggagatttcaagcgctttggggccaaaggcagaaaaggaaatatcttcgtataaaaactagacagaatcattctcagaaactgctctgcgatgtgtgcgttcaactctcagagtttaacttttcttttcattcagcagtttggaaacactctgtttgaaaagtctgcacgtggatattttgaccacttagaggccttcgttggaaacgcgtttttttcctgtaaggctagacagaagaattcccagtaacttccttgtgttgtgtacattcaactcacagagttgaacgttcccttagacagagcagatttgaaacactctttttgtgaaattggcaagtggtgatttcagccgctttgaggtcaatggtagaaaaggaaatatcttcgtataaaaactagacagaatcattcccacaaactgcgttgtgatgtgttcgttcaactcacagagtttaacctttctgttcatagagcagttaggaaacactctgtttgtaaagtctgcaagtggatattcagacctccttgaggccttcgttggaaacggggtttcttcatattctgctagacagaagaattctcagtaacttccttgtgttgtgtgtattcaactcacagagttgaacgatcctttacacagagcagacttgaaacattctttttgtcgaatttgcaagtggagatttcagccgctttgaggtcaatggtagaataggaaatatcttcctatagaaactagacagataatgattctcagaaactcctttgtgatgtgtgcgttcaactcacagagtttaacctttcttttcatagagcagttaggaaacactctgtttgtaaagtctgcaagtggatattcagacctctttgaggccttcgttggaaacgggtttttttcatataaggctagacagaagaattcccagtaacttccttgtgttgtgtgtgttcaactctgtgagttgaacttccatttacacagagcagatttgaaacactctttttgtggaatttgcaagtggagatttcaagcgctttgaggccaaaggcagaaaaggaaatatcttcgtttcaaaactagacagactcattctcaagaaactgctctgcgatgtgtgcgttcaactctcagagtttaacttttcttttcattcagcagtttggaaacactctgtttgtaaaatctgcacgtggatattttgaccacttagaggccttcgttggaaacgggtttctttcctgtaaggctagacagaagaattcccagtaacttacttgtgttgtgtacattcaactcacagagttgaacgttcccttagacagagcagatttgaaacactctttttgtgcaattggcaagtggtgatttcagctgctttgaggtctatggtagaaaagggaatatcttcggtataaaaactagacagaatcattcccacaaactgcgttgtgatgtgttcgttcaactcacagagtttaacctttctgttcatagaacagttaggaaacactctgtttgtaaagtctgcaagtggatattcagacctccttgaggccttcgttggaaacgggatttcttcatattctgctagaccgaagagttctcagaatcttccttgtgttgtgtgtattcaactcacagaattgaacgatcctttacacagagcagacttgaaacactctttttgtggaatttgcaagtggagatttcagccgctttgaggtccatggtagaaaaggaaatatcttcgtataaaaactagacagaatgattctcagaaactcctttgtgatgtgtgcgttcaactcacagagtttaacctttcttttcatagagcagttaggaaacactctgtttctaaagtctgcaagtggatattcagacctctttgaggccttcgttggaaacgggtttttttcatataaggctagagagaagaattcccagtaacttccttgtgttgtgtgtgttcaactcacagagttgaactttcatttacacagagcagatttgaaacactctttttgtggaatttgcaagtggaaatttcaagcgctgtgaggccaaaggcagaaaaggaaatatcttcgtataaaaactagacagaatcattctcagaaactgctctgcgatgtgtgcgttcaactctcagagtttaactttgcttttcatacagcagtttggaaacactctgtttgtaaagtctgcacgtggataatttgaccacttagaggccttcgttggaaacgggtttttttcatgtaaggctagacagaagaattctcagtaacttccttgtgttgtgtgtattcaactcacagagttgcacgatcctttacacagagcagacttgaaacactctttttgtggaatttgcaagtggagatttcagccgctttgaggtcaatggtagaataggaaatatcttcctatagacactagacagaatgattctcagaaactgctttgtgatgtgtgtgttcaactcacagagtttaacatttcttttcatagagcagttaggaaacactctgtttgtaaagtctgcaagtggatattcagacctctttgaggccttcgttggaaacgggtttttttcatataaggctagacagaagaattctcagtaacttccttgtgttgtgtgtattcaactgacagagttgaactttcatttagagagagcagatttgaaacactgtttttgtggaatttgcaagtggaaatttcaagtgctttggggccaaaggcagaaaaagaaatatcttcgtataaaaacttgacagaatcactctcagaaactgctctgcgatgtgtgcgttcaactctcagagtttaacttttgttttcattcagcagtttggaaacactctgtttgtaaagtctgcacgtggatattttgaccactcagaggccttcgttggaaacgggtttttttcctgtaaggctagacagaaagaattcccagtaacttccttgtgttgtgtgcattcaactcacagagttgaacgttcccttagacagagcagatttgaaacactctatttgtgcaatttgaaagtgtagatttcaagcgctttaaggtcaacggcagaaaaggaaatatcttcgtttcaaaactagacagatgattctcagaaactcctttgtgatgtgtgcgttcaactcacagagtttaacctttcttttcatagagcagttaggaaacattctgtttgtaaagtctgcaagtggatattcagacatctttgaggttttcgtaggaaacgggatttcttcatattctgctagacagaagaattctcagaaacttccttgtgttgtgtttattcaactcacagagtcgaacgatcctttactcagagcagacttgaaacactccatttgtggaatttgcaagtggagatttcagccgctttgaggtcaatggtagaataggaaatatcttcctatggaaactagacagaatgattctcagaaactcctttgtgctgtgtgcgttcagctcacagagtttaaactttcttttcatagagcagttaggaaacactctgtttgtaaagtctgcaagtggatattcagacatctttgaggctttcgttggaaacgggatttcttcatattctgctagacagaagaattctcagaaacttccttgtgttgtgtgttttcaactcacagagttcaacgatccattacacagagtagacttgaaacactctttttgtggaattggcaagtggagatttcagccgctttgaggtcaatggtagaaaaggaaatatcttcgtataaaaactagacagagtgattctcagaaactcctttgtgatgtctgcgttcaactcacagagtttaacctttcttttcatagagcagttaggaaacactctggttgtaaagtctgcaagtgcatattcagacctccttgaggccttcgttggaaacgggatttcttcatattctgctatacagaagaattctcagaaacttccttgtgttttgtgtattcaactcacagagttgaacgatcctttacacagagcagacttgaaacactctttttgtggaatttgcaagtggagatttcagccgctttgaggtcaatggtagaaaaggaaatatcttcgtataaaaactagacagaatgattctcagaaactcctttgtgatgtgtgcgttcaactcacagagtttaacctttcttttcatagagcagttaggaaacactctgttggtaaagtctgcaaggggatattcagacctctttgaggccttctttggaaacgggatttcttcatattctgctagacagaagaattctcagtaacttccttgtgttgtgtgtattcaactcacagagttgaatgatcctttacacagagcagacttgaaacactctttttgtggaatttgcaagtggagatttcagccgctttgaggtcaatggtagaataggaaataacttcctatagaaactagacagaatgattctcagaaactcctttgtgatgtgtgcgttcaactcgcagagtttaacctttcttttcatagagcagttaggaaacactctggttgtaaagtctgcaagtggatattcagacctccttgaggccttcgttggaaacgggatttcttcatattatgctagacagaaagcaattctcagtaacttccttgtgttgtgtgtattcaactcacagagttgaacgatcctttacacagagcagacttgaaacactctttttgtggaatttgcaagtggagatttcagccgctttgaggtcaatggtagaaaaggaaatatcttcgtataaagactagacagaatgattctcagaaactcctttgtgatgtgtgcgttcaactcacacagtttaacctttcttttcatagagcagttgggaaacactctgtttgtaaagtctgcaagtggatattcagacctccttgaggccttcgttggaaacgggatttcttcatattctgctagacagaagaattctcagtaacttccttgtgttgtgtgtattcaactcacagagttgaacgatcctttacacagagcagacttgaaacactctttttgtggaatttgcaagtggagatttcagccgctttgtggtcaatggtagaaaaggaattatcttcgtataaagactagacagaatgattctcagaaaatcctttgtgatgtgtgcgttcaactaacagagtttaacctttcttttcatagagcagttaggaaacactctgtttgtaaagtctgcaagtggatattcagacatctttgaggctttcgttggaaacgggatttcttcatattctgctatacagaagaattcccagtaacttcctcgtgttgtgtgtgttcaactcacagagttgaactttcatttacacagagcagatttgaaacactctttttgtggaatttgcaagtggagatttcaagcgctttgaggccaaaggcagaaaaggaaatatcttcgtataaaaactagacagaatcattctcagaaactgctctgcgatgtgtgcgttcaactctcagagtttaacttttcttttcattcagaagtttggaaacactctgtttgtaaagtctgcacgtggataacttgaccacttagaggccttcgttggaaacgggtttttttcctgtaaggctagacagaagaattctcagtaaattccttgtgttgtgtgtattcaactcacagagttgaacgatcctttacacagagcagacttgaaacactctttttgtggaatttgcaagtggagatttcagccgctttgaggtcaatggtagaataggaaatatcttcctatagaaactagacagaatgattctcagaaacttctttgtgatgtgtgcgttcaactcacagagtttaacatttcttttcatggagcagttaggaaacactctgtttgtaaactctgcaagtggatattcagacctctttgaggccttcgttggaaacgggatttcttcatactgtgctagacagaacaattcccagtaacttccttgtgttgtgtgtgttcaactcacagagttgaactttcatttacacagagcagatttgaaacactctttttgtggaatttgcaagtggagatttcaagcgctttgaggccaaaggcagaaaaggaaatatcttcgtataaaaactagacagaatcattctaagaaactgctctgcgatgtgtgtgttcaactctcagagtttaacttttcttttccttcagcagtttggaaacactctgtttgtaaagtctgcacgtacataatttgaccacttagaggccttcgttggaaacgggtttttttcatgtaaggctagacagaagaattcccagtaacttccttgtgttgtgtgcattcaactcacagagttgaacgttcccttagacagagcagatttgaaacactctatttgtgcaatttgcaagtgtagaattcaagcgctttaaggtgaatggcagaaaaggaaatgtcttcgtttcaaaactagacagaatcattcccaaaaactgcgttgtgatgtgttcgttcaactcacagagtttaacctttctgttcatagagcagttaggaaacactctgtttgtaaagtccgtaagtggatattctgacatcttgtggccttcgttggaaacgggatttcttcatattctgctagacagaagaattctcagtaacttccttgtgttgtgtgtattcaactcacagagttgaacgatcctttacacagagcagacttgaaacactctttttgtggaatttgcaagtggagatttcagccgcgttgaggtcaacggtagaaaaggaaatatcttcgtataaatactagacagaatgattctcagaaactcctttgtgatgtttgcgttcaactgacagagtttaaactttcttttcatagagcagttaggaaacactctgtttgtaaagtctgcaagtggatattcagacctctttgaggccttcgttggaaacgggatttcttcatattctgctagacagaagaattcccagtaacttccttgggttgtgtgtgttcaactcacagagttgaactttcatttacacagagcagatttgaaacactctttttgtggaatttgcaggtggagatttcaagcgctttgaggccaaaggcagaaaaggaaatatcttcgtataaaaactagacagaatcattctcagaaactgctctgcgatgtgtgcgttcaactctcagagtttaacttttgttttcattcagcagtttggaaacactctgtttgtaaagtctgcacgtggataatttgaccacttagaggccttcgttgtaaacgggtttttttcctgtaaggctagacagaggaattcccagtaacttccttgtgttgtgtgcattcaactcacagagatgaacgttcccttagacagagcagatttgaaacactctatttgtgtaatttgcaagtgtagatttcaagcgctttaaggtcaatggcagaaaaggatatatctccgtttcaaaactagacagaatcattcccacaaactgcgttgtgatgtgttcgttcaactcacagagtttaacctttctgttcatagagcagttaggaaacactctgtttgtaaagtctgtaagtggatattctgacatcttctggccttcgttggaaacgggatttcttcatattctgctagacagaagaattctcagaatcttccttgtgttgtgtgtattcaactcacagagttgaacgatcctttacacagagcagacttgaaacactctttttgtggaatttgcaagtggagatttcagccgctttgaggtccacggtagaaaaggaaatatcttcgtataaaaactagacggaatgattctcagaaactcctttgtgatgtgtgcgttcaactcacagagtttaacctttcttttcatagagcagttaggaaacactctgtttgtaaagtctgcaagtggatattcagacctctttgaggctttcgttggaaacgggatttcttcatattctgctagacagaagaattctcagtaacttccttgtgttgtgtgtattcaactgacagagttgaactttcatttagagagagcagatttgaaacactgtttttgtggaatttgcacgtggagatttcaagcgctttggggccaaaggcagaaaaggaaatatcttcgtataaaaactagacagaatcattctcagaaactgctctgcgatgtgtgcgttcaactctcagagtttaacttttcttttcattcagaagtttggaaacactctgtttgtaaagtctgcacgtggataacttgaccacttagaggccttcgttggaaacgggtttttttcatgtaaggctagagagaagaattcccagtaacttccttgtgttgtgtacattcaactcacagagttgaacgttcccttagacagagcagatttgaaacactctttttgtgcaattggcaagtggcgatttcagcctctttgaggtcaatggtagaaaaggaaatatcttcgtataaaaactagacagaatgattctcagaaacttcattctgatgtgtgtgttcaactcacagagtttaacctttcttttcatagagcagttgggaaacagtctgtttgtaaattctgtaagtggatattctgacatcttgtggccttcgttggaaacgggatttcttcatattctgctagacagaagaattctcaagtaacttccttgtgttgtgtgtattcaactcacagagttgaacgatcctttacacagagcggacttgaaacactcgttttgtggaatttgcaagtggaggtttctgccgcgttgaggtcaatggtagaaaaggaaatatcttcgtataaaaactagacagaatgattctcagaaactcctttgtgatgtgtgcgttcaactcacacagtttaacctttcttttcatagagcagttaggaaacactctgtttgtaaagtctgcaagtggatatacagacctccttgaggccttcgttggaaacgggatttcttcatattatgctagacagaagaattctcagtaacttccttgtgttgtgtgtattcaactcacagagttgaaggatcctttacagagagcaggcttgaaacactctttttgtcgaatttgcaagtggagatttcagccgctttgaggtcaatggtagaataggaaatatcttctaatagaaactagacagaatgattctcagaaacttcattgtgatgtgtgcgttcaactcacagagtttaacctttcttttcatagagcagttaggaaacactctgtttgtaaactctgcaagtggatattcagacctctttgaggccttcgttggaaacgggatttctccatactttgctagacagaagaattctcagtaacttccttgtgttgtgtttattcaactcacagagttgaatgatcctttacacagagcagacttgaaacactctttttgtggaatttgcaagtggagatttcagccgctttgaggtcaacggtagaaaagtaaatatcttcgtataaagactagacagaatgattctcagaaactcctttgtgatgtgtgcgttcaactcacagagtttaacctttcttttcatagagcagttaggaaacactctgtttgtaaagtctgcaagtggatattcagacctccttgaggccttcattggaaacgggatttcttcatattatgctagacagaagaattctcagtaacttccttgtgttgtgtgtattcaactcacagagttgaacgatcctttacacagagcatacttgaaacactcttgttgtggaatttgcaagtggagatttcagccgatttgagttcaatggtagaataggaaatatcttcctatagaaactagacagaatgattctcagaaactcctttgtgatgtgtgcgtacaactcacagagttcaacctttcttttcatagagcagttgggaaacactctgtttgtaaagtctgcaagtggatattcagacttctttgaggccttcgttggaagcgggatttcttcatattatgctagacagaagatttcccagtaacttccttgtgttgtgtacattcaactcacagagttgaacgttcccttagacagagcagatttgaaacactctttttgtgcaattggcaaatggagatttcaagcgctttaaggtcaatggcagaaaagaaaatatcttcgtttcaaaactagacagaatcattcccacaaactgcgttgtgatgtgttcgttcaactcacagagtttaacctttctgttcatagagcagttaggaaacactctgtttgtaaagtctgtaagtggatattctgacattttgtgtccttcgttggaaatgggatttcttcatattctgctagacagaagaattctcagtaacttccttgtgttgtgtgtattcaactcacagagttcaacgatgctttacacagagtagacttgaaacacactttttgttgaatttgcaagtggagatttcagccgctttgaggtcaatggtagaataggaaatatcttcgtataaaaagtagacagaatgattctcagaaactcctttgtgatgtgtgtgttcaactcacagagtttaacctttcttttcatagagcagttaggaaacactctgtttgtaaagtctgcaagtggatattcagacctcttgaggccttcgttggaaacgggtttttttcatataaggctagacagaagaattcccagtaacttccttgtgttgtgtgtgttcaactcacagagttgaactttcatttacacagagcagatttgaaacactctttttgtggaatttgcaaatggagatttcaagcgctttgaggccaaaggcagaaaaggaaatatcttcgtataaaacctagacagaatcattctcagaaactgctctgcgatgtgtgcgttcaactctcagagtttaacttttcttttcattcagcagtttggaaacactctgtttgtaaagtctgcacgtggataatttgacctcttagaggccttcgttggaaacgggtttttttcctgtaaggctagacagaagaattctcagtaacttccttgtgttgtgtgtattcaactcacagagttgaacgatcctttacacagagcagacttgtaagactctttttgtggaatttgcaagtggagatttcagccgctttgaagtcaaaggtagaaaaggaaatatcttcctataaaaactagacagaatgattctcagaaacttctttgtgatgtgtgcgttcaactcacagagtttaacctttcttttcatagagcagttaggaaacactctgtttgtaaactctgcaagtggatattcagacctccttgaggccttcgttggaaacgggatttcttcatactgtgctagacagaagaattctcagtaacttccttgtgttgtgtgtattcaactgacagagttgaactttcatttagagagagcagatttgaaacactgtttttgtggaatttgcaagtggagatttcaagcgctttggggccaaaggaagaaaaggaaatatcttcgtataaaaactagacagaatcattctcagaaaatcctctgtgatgtgtgcgttcaactctcagagtttaacttttcttttcattcagcagtttggaaacactctgtttgtaaagtctgcacgtggatattttgaccacttagaggccttcgttggaaacgggtttttttcatataaggctagacagaagaattcccagtaacttccttgtgttgtgtgcattcaactcacagagttgaacgttcccttagacagagccgatttgaaacactctatttgtgcaatttgcaagtgtagatttcaagcgctttaaggtcaatggcagaaaaggaaatatcttcgtttcaaaactagacagaatcattcccacaaactgcgttgtgatgtgttcgttcaactcacagagtttaacctttctgttcatagagcagttaggaaacactctgtttgtaaagtctgtaagtggatattctgacatcttgtggccttcgttggaaacgggatttcttcatattctgctggacagaggaattctcaggaacttccttgtgttgtgtgtattcaactcacagagttgaacgatcctttacacagagcagacttgaaacacactttttgtggaatttgcaagtggagatttcagccgctttgagttcaaaggtagaataggaaatatcttcctatagaaagtacacagaatgattctcagaaactgctttgtgatgtgtgcgttcaactcacagagttcaacctttcttttcatagagcagttgggaaacactctgtttgtaaagtctgcaagtggatattcagacttctttgaggccttcgttggaagcgggatttcttcatattctgctagacagaataattctcagtaacttccttgtgttgtgtgtattcaactcacagagttgaacgatcctttacagagagcagacttgaaacactctttttgtgtaatttgcaagtggagatttcagccgctttgaggtcaatggtagaataggaaatatcttcctatagaaactagacagaatgattctcagaaactcctttgtgatgtgtgcgtgcaactcacagagtttaacctttcttttcatagagaagttaggaaacactctgtttgtaaagtctgcaagtggatattcagacatccttgaggctttcgttggaaacgggatttcttcatattctgctagaaagaagaattctcattaacttccttgtgttgtgtgtattcaactcacagagttgaaggatcctttacacagagcggacttgaaacactctttttgtggaatttgcaagtggagatttcagccgcgttgaggtcaatggtagaaaaggaaatctcttcgtataaaaagtagacagaatgattctcagaaactcctttgtgatgtgtgtgttcaacccacagagtttaacctttcttttcatagagcagttaggaaacactctgtttgtaaagtctgcaagtggatattccgatctctttgaggccttcgttggaaacgggtttttttcatataaggctagacagaaggattcccagtaacttcccttgtgttgtgtgtgttcaactcacagagttgaactttcatatacaaagagcagatttgaaacactctttttgtggaatttgcaagtggagatttcaagcgctttgaggccaaaggcagaaaaggaaatatcttcgtataaaaactagacagaatcattctcagaaactgctgtgtgatgtgtgcgttcaactctcagagtttaacttttcttttcattcagcggtttggaaacactctgtttgtaaagtctgcacgtggatattttgaccacttagaggccttcgttggaaacggttttttttcatgtaaggctagacagaagaattcccagtaacttccttgtgttgtgtacattcaactcacagagttgaacgttcccttagacagagcagatttgaaacactctttttgtgcaattggcaagtggtgatttcagccgctttgaggtcaatggtagaaaaggaaatatcttcgtataataactagacagaatcattcccacaaactgcgttgtgatgtgttcgttcaactcacagagtttaacctttctgttcatagagcagttaggaaacactctgtttgtaaagtctggaagtggatattcagacctccttgaggccttcgttggaaacgggatttcttcatattctgctagacagaagaattctcagtaacttccttgtgttgtgtgtattcaactcacagagttgaacgatcctttacacagagcagacttgaaacactctttttgtggaatttgcaagtggatatttcagccgctttgaggtcaatggtagaataggaaatatcttcctatagaaactagacagaatgattctcagaaactcctttgtgatgtgtgcgttcaactcacacagtttaacctttcttttcatagagcagttaggaaacactctgtttgtaaagtctgcaagtggatattcagacctctttgaggcattcgttggaaacgggatttctacatattatgctagacagaagaattcccagtaacttccttgtgttgtgtgtgttcgactcacagagttgaactttcatttacacagagcagatttgaaacactctttttgtggaatttgcaagtggagatttcaagcactttgaggccaaaggcagaaaaggaaatatcttcgtttcaaaactagacagaattattctcagaaactcctttgtgatgtgtgcgttcaactcacagagtttaacctttcttttcatagagcagttaggaaacactctgtttgtaaagactgcaagtggatattcagacctctttgaggccttcgttggaaacgggtttttttcctgtaaggctagacagaagaattcccagtaacttccttgtgttgtgtacattcaactcacagagttgaacgttcccttagacagagcagatttgaaacactctttttgtgcaattggcaagtggagatttcaagcgctttacggtcaatggcagaaaaggaaatatcttcgtttcaaaacaagacagaatcattcccacaaactgcgttgtgatgtgttcgttcaactcacagagtttaacctttctgttcatagagcagttaggaaacactctgtttgtaaagtctgcaagtggatattcagacctctttgaggccttcgttggaaacgggatttcttcatattctgctagacagaagaattctcagtaacttccttgtgttgtgtgtattcaactcacagagttgaacaatcctttacacagagcagagttgaaacactctttttgtggaatttgcaagtggagatttcagctgctttgaggtcaatggtagaataggaaatatcttcctatagaaactagacagaatgattctcagaaactcctttgtgatgtgtgcgttcaaatcacagagtttaacctttctgttcatagagcagttaggaaacactctgtttgtaaagtctgccagtggatattcagacctccttgattccttcgttggaaatgggatttcttcatattctgctagacagaagaattctcagtaacttctttgtgttgtgtgtattcaactcacagagttgaacgatcctttacacagagcagacatgaaacactctttttgtggaatttgcaagtggagatttctgccgctttgaggtcaatggtagaataggaaatatcttcctatagaaaatagacagaatgattctcagaaacttctttgtgatgtgtacgttcaactcacaggagtttaacctttcttttcttagagcagttaggaaacactctgtttgtaaagtctgcaagtggatattcagacctctttgaggccttcgttggaaacgggtttttttcatataaggctagacagaagaattctcagtaacttccttgtgttgtgtgtattcaactcacagatttcaacgatcctttacacagagcagacttgaaacactctttttctggaatttgcaagtggagatttcagccgctttgaggtcaatggtagaataggaaatatcttcctatagaaactagacagaatgattctcagaaactcctttgtgatgtgtgcgttcaactcacagagtttaacgtttcttttcacagagcagttaggaaacactctgtttgtaatgtctgcaagtggatattcagaaccctttgaggccttcgttggaaacgggatttcttcatattatgctagacagaataattctcagtaacttccttcttttgtgtgtattcaactcacagagttgaacgatcctttacagagagcagacttgaaacactctttttgtggaatttgcaagtggagatttcaggcgctttgaggtcaatggtagaataggaaatatcttcctatagaaactagacagaatgattctcagaaactcctttgtgatgtgtgcgttcaactcacagagtttaagctttcttttcatagagcagttaggaaacactctgtttgtaaagtctgcaagtggctattcagacccctttgaggccttctttcgaaacgggatttcttcatattatgctagacagaagaattctcagtaacttccttgtgttgtgtgttttcaactgacagagttaaactttcatttagagagagcagatttgaaacactgtttttgtggaatttgcaagtggagatttcaagcgctttgtggccaaaggtagaaaaggaaatatcttcgtataaaaactagacagaatcattctcagaaactgctctgcgatgtgtgcgttcaactctcagagtttaacttttcttttcatagagcagttaggaaacactctggtttgtaaagtctgcatgtggataatttgaccacttagaggtctttgttggaaacgggttttttcatgtaaggctagacagaagaattcccagtaacttccttgtgttgtgtgcattcaactcacagagttgaacgttcccttagacagagcagatttgaaacactctatttgtgcaatttgcaagtgtagatttcaagcgctttaaggtcaatggcagaaaaggaaatttcttcgttttaaaactagacagaatgattctcagaaactcctttgtgatgtgtgcgttcaactcacagagtttaacgtttcttttcatagagcagttaggaaacactctgtttgtaaagtctgcaaggggatattcagacctctctgaggccttcgttggaaacgggatttcttcatattctgcttcacagaagaattctcagtaacttcccttgtgttgtgtgtattcaactcacagagttgaacgatcctttacacagagcagacttgaaacactctttttgtggaatttgcaagtggagatttcagccgctttgaggtcaatggttgaataggaaatatcttccaatagaaactagacagaatgattctcagaaactcctttgtgatgtgtgcgttcaactcacagagtttaacctttcttttcatagagtagttaggaaacactctgtttgtaaagtctgcaagtggatattcagacctctttgagaccttcgttggaaacgggtttttttcatataaggctagacagaagaattctcagtaacttccttgtgttgtgtgtattcaactcacagagttgaacgatcctttacacagagcagacttgaaacattctttttgtggaatttgcaagtggagatttcagccgctttgaggtcaatggtagaaaagtaaatatcttcctataaagactagacagaatgattctcagaaacttctttgtgatgtttgcgttcaactcacagagtttaacctttcttttcatagagcagttaggaaacactctgtttgtaaagtctgcaagtggatattcagacctccttgaggccttcgttggaagcgggatttcttcatgttctggtagacagaagaattctcagtaacatctttgtgttgtgtgtattcaactcacagagtggaacgatcctttacagagagcagacttgaaacactctttttgtggaatttgcaagtggagatttcagccgctttgaggtcaatggtagaataggaaatatcttcctatagaaactagacagaatgattctcagaaactcctttgtgatgcgtgcgttcaactcacagagtttaacctttcttttcatagagcagttaggaaacactctgtttgtaaagtctgcaagtggatattcagacctctttgaggccttcgttggaaacgggatttcttcatattatgctagacagaagaattctcagtaacttccttgtgttgtgtgtattcaactgacagagttgaactttcatttagagagagcagatttgaaacactgtttttgtggcatttgcaagtggagatttcaagcgctttggggccaaaggcagaaaacgaaatatcttcgtataaaaactagacagaatcattctcagaaactgctctgcgatgtgtgcgttcaactctcagagtttaacttttcttttcattcagcagtttggaatcactctgtttgtaaagtctgcacgtggatattttgaccacttagaggccttcgttggaaacgggtttttttcctgtaaggctagacagaagaattctcagtaacttccttgtgttgtgtgtattcaactcacagagttgaacgatcctttacacagagcagacttgtaacactcattttgtggaatttgcaagtggagatttcagccactttgaagtcaaaggtagaaaaggaaataacttcctataaaaactagacagaatcattcccacaaactgcgttgtgatgtgttcgttcaactcacagagtttaacctttctgttcatagagcagttaggaaacactctgtttgtaaagtctgtaagtggatattctgacatcttgtggccttctttggaaacgggatttcttcatattctgctagacagaataattctcagtaacttctttgtgttgtgtgtattcaactcacagagttgaaggatcctttacagagagcaggcttgaaacactctttttgtcgaatttgcaagtggagatttcagccgctttgaggtcaatggttgaataggaaatagcttcttatagaaactagacagaatgattctcagaaactcctttgtgatgtgtgcgttcaactcacagagtttaacctttcttttcatagcgcagttgggaaacactctgtttgtaaagtctgcaagtggatattcagacatccttgaggctttcgttggaaacgggatttcttcatattctgctagaaagaagaattctcagtaacttccttgtgttgtgtgtattcaactcacagagttgaacgatcctttacacagagcagacttgaaacactctttttgtggaatttacaagtggagatttcagccgatttgaggtcaatggtagaaaaggaaatatcttcctatagaaactagacagaatgattctcagaaactcctttgtgatgtgtgcgttcaactcacagagttcaacctttcttttcatagagcagttgggaaacactctgtttgtaaagtctgcaagtggatattcagacctccttgaggccttcgttggcaacgggatttcttcatattctgctagacagaagaattctcagtaacttccttgtgttgtgtgtattcaactcacagagttgaacgatcctttacacagagccgacttgaaacactctttttgtggaatttgcaagtggagatttcagccgctttgagttcaatggtagaataggaaatatcttcctatagaaactagacagaaagattctcagaaactccttcgtgatgtgtgcgttcaactcacagagtttaacctttcttttcagagagcagttaggaaacactctgtttgtaaagtctgcaagtggatattcagacctctttgaggccttcgttggaaacgggatttcttcatattctgctagacagaagaattcccagtaacttccttgtgttgtgtgtgttcaactcacagagttgaactttcatttacacagagcagatttgaaacactctttttgtggaatttgcaagtggagatttcaagcgatttgaggccaaaggcagaaaaggaaatatcttcgtataaaaagtagacagaatcattctcagaaactgctctgagatgtgtgcattcaactctcagagtttaacttttcttttcattcagcagtttggaaacactctgtttgtaaagtctgcacgtggataatttgaccacttagaggccttcgttggaaacgggtttttttcatgtaaggctagacagaagaattcccagtaacttccttgtgttgtgcgcattcaactcacagagttgaacgttcccttagacagagcagatttgaaacactctatttgtgcaatttccaagtgtagatttcaagcgctttaaggtcaacggcagaaaaggaaatatccttcgtttcaaaactagacagaatcattcccacaaactgcgttgtgatgtgttcgttcaactcacagtagtttaacctttcttttcatagagcagttaggaaacagtctgtttgtcaattctgtaagtggatattctgacatcttgtggccttcgttggaaacgggatttcttcatattctcctagacagaagaattctcagtaacttccttgtgttgtgtgtattcaactcacagagttgaaagatcctttacacagagcagacttgaaacactctttttgtggaatttgcaagtggagatttcagccgctttgatgtcactggtagaaaaggaaatatcttcgtataaagactagacagaatgattctcagaaactcctttgtgatgtgtgcgttcaactcacagagtttaacctttcttttcatagagcagttaggaaacactctgtttgtaaagtctgcaagtggatattcagacctctttgaggaaatcgttggaaacgggatttcttcacattctgctagacagaagaattcccagtaacttccttgtgttgtgtgtgttcaactcacagagttgaactttcatttacacagagcagatttgaaacactctttttgtggaatttgtaagtggagatttcaagcgctttgaggccaaaggcagaaaaggaaatatcttcgtttcaaaactagacagaatcattctcagaaactgctgcgtgatgtgtgctttcaactctcagagtttaacttttcttttcattcagcggtttggaaacactctgtttgtaaagtctgcacgtggatattttgaccacttagaggccttcgttggaaacgggtttttttcatgtaagggtagacagaataattctcagtaacttccttgtgttgtgtgtattctactcacagagttgaacgatcctttacacagagcagacttgaaacactctttttgtggaatttgcaagtggatatttcagccgctttgaggtcaatggtagaataggaaatatcttcctatagaaactagaccgaatgattctcagaaactcctttgtgatgtgtgcgttcaactcacaagagtttaacctttcttttcttagagcagttaggaaacactctgtttgtaaagtctgcaagtggatattcagacctccttgaggccttcgttggaaacgggtttttttcatataaggctagacagaagaattcccagtaacttccttgtgctgtgtgtgttcaactcacagagttgaactttcatttacacagagcagatttgaaacactctttttgtggaatttgcaagtggagatttcaagcgctttgaggccaaaggcagaaaaggaaatatcttcgtttcaaaactagacagaatcattctcagaaaatcctctgtgatgtgtgcgttcaactctcagagtttaacttttcttttcattcagcagtttggaaacactctgtttgtaaagtctgcacgtggatattttgaccacttacaggccttcgttggaaacgggttttttcatgtaagggtagacagaagaattcccaggaacttccttgtgttgtgtacattcaactcacagagttgaacgttcccttagacagagcagatttgaaacactctttttgtgcaattggcaagtggtgatttcagccgctttgaggtcaatggtagaaaaggaaatatcttcgtagaaaaactagacagaatgattctcagaaactcctttgtgatgtgtgcgttcaactcacagagtttaacctttcttttcatagagcagttaggaaacactctgtttgtaaagtctgcaagtggatattcagacctccttgaggccttcgttggaaacgggatttcttcatattctgctagatagaagaattctcagtaacttccttgtgttgtgtgtattcaacttacagagttgaacgattctttacacagagcagacttgaaacactctttttgtggaatttgcaagtggagatttcagccgctttgaggtcaatggtagaaaaggaaatatcttcgtataaagactagacagaatgattctcagaaactcctttgtgctgtgtgcgttcaactcacagagtttaacctttcttttcatagaacagatagtaaacactctgtttgtaaagtctgcaagtggatattcagacatctttgaggctttcgttggaaacgggatttcttcatattctgctagacagaataattctcagtaacttccttgtgttgtgtgtattcaactcacagagttgaacgatcctttacacagagcagacttgaaacactctttttgtggaatttgcaagtggagatttcagccgcgttgaggtcaatggtagaataggaaatatcttcctatagaaactagacagaatcattctcagaaactgctgcgtgatgtgtgcgttcaactctcagagtttaacttttcttttcattcagcggtttggaaacactctgtttgtaaagtctgcacagtggatattttgaccacttagaggccttcgttggaaacgggtttttttcaagtaaggctagacagaagaattcccagtaacttccttgtgttgtgtacattcaactcacagagttgaacgttcccttagacagagcagatttgaaacactctttttgcgcaattggcaagtggagatttcaagcgctttaagatcaatggcagaaaaggaaatatcttcgtttcaaaactagacagaatgattctcagaaactcctttgtgatgtgttcgttcaactcacagagtttaacctttcttttcatagagcagttaggaaacactctgtttgtaaagtctgcaagtggatattcagacatccttgaggctttcgttggaaacgggatttcttcatattctgctagaaagaagaattctcagtaacttccttgtgttgtgtgtattcagctcacagagttgaacgatcctttacacagagcagacttgaaacactctttttgtggaatttgcaagtggagatttcagccgctttgaggtcaatggtagaataggaaatatcttcctatagaaactagacagaatgattctcagaaaaacctttgtgatgtgtgtgttcaactcacagagtttaacctttcttttcatagagcagttaggaaacactctgtttttaaagtctgcaagtggatattgagacctctttcaggccttcgttggaaacgggatttcttcatattatgctagacagaagaattctcagtaacttccttgcgttgtgtgtattcaactgacagagttgaactttcatttagagagagcagatttgaaacactgtttttgtcgaatttccaatggagatttcaagcgctttggggccaaaggcagaaaaggaaatatcttcgtataaaaactagacagaatcattctcagaaactgctgcgtgatgtgtgcgttcaactcctcagagtttaacttttcttttcattcagcggtttggaaacactctgtttgtaaagtctgcacgtggaaattttgaccacttagaggccttcgttggaaacgggtttttttcatgtaaggctagacagaagaattcccagtaacttccttgtgttgtgtgcattcaactcacagagttgaacgttcccttagacagagcagatttgaaacactctatttgtgcaatttgcaagtgtagttttcaagctctttaaggtcaacggcagaaaaggaaatatcttcgtttcaaaactagacagaatcattcccacaaactgcgatgtgatgtgttcgttaaactcacagagtttaacctttctgttcatagagcagttaggaaacactctgtttggaaagtctgtaagtggatattctgacatcttgtggccttcgttggaaacgggatttcttcatattctgctagacagaagaattctcagaatcttccttgtgttgtgtgtattcaactcaaagagttgaacgatcctttacacagagcagacttgaaacactctttttgtggaatttgcaagtggagatttcacccgctttgaggtccatggtagaaaaggaaatatctttgtataaaaactagacagaatgattctgagaaactcctttgtgatgtgtgcgttcaactcacagagtttaacctttcttttcatagagcagttaggaaacactctgtttgtaaagtctgcaagtggatattcagacctctttgaggccttcgttggaaacgggatttcatcatattctgctagacagaagaattctcattaacttccttgtgttgtgtgtattcaactcacagagttgaacgatcctttacacagagcggacttgaaacactctttttgtgtaatttgcaagtggagatttcagccgcgttgaggtcaatggtagaaaaggagatctcttcgtataaaaactagacagaatgattctcagaaactcctttgagatgtgtgcgctcaactcacagagtttaacctttctttttatagagcagttaggaaacactctgtttgtaaagtctgcaagtggatattcagacctctttgaggccttcgttggaaacgggtttttttcatataaggctagacagaagaattcccagtaacttccttgtgttgtgtgcattcaactcacagagatgaacgttcgcttagacagagcagatttgaaacactctatttgtgcaatttgcaagtgtagatttcaagcgctttaaggtcaatggcagaaaaggaaatatcttcgtttcaaaactagacagaatcattcccacaaactgcgttgtgatgtattcgttcaactcacagagtttaacctttctgttcatagagcagttaggaaacactctgtttgtaaagtctgtaagtggatattctgacatcttgtggcccttcgttggaaacgggatttcttcatattctgctagacagaagaattcccagtaacttccttgtgttgtgtgtattcaactcacagagttgaacgatcctttacacagagcagacttgaaacactctttttgtggaatttgcaagtggagatttcagccgctttgaggtcaatggtagaaaaggaaatatcttcgtagaaaaactagacagaatgattctcagaaactcctttgtgatgtgtgtgttcaactcacagagtttaacctttcttttcatagggcagttaggaaacactctgtttgtaaagtctgcaagtggatattcagacctcctagaggccttcgttggaaacgggatttcttcatattctgctacacagaagaattcccagtaacttccttgtgttgtgtgtgttcaactcacagagttgaactttcatttacccagagcagatttgaaacactcttttagtggaatttgcaagtggagatttcaagcgctttgaggccaaaggcagaaaaggaaatatcttcgtttcaaaattagacagaatcattctcagaaactgctgcgtgatgtgtgcgttcaactctcagagtttaacttttcttttcattcagcggtttggaaacactctgtttgtaaagtctgcacgtggttattttgaccacttagacgccttcgttggaaacgggtttttttcatgtaaggctagacagaagaattcccagtaacttccttgtgttgtgtgcattcaactcacagagttgaacgttccgtagacagagcagatttgaaacactctatttgtgcaatttgcaagtgtagatttcaagcgctttaaggtcaatggcagaaaaggaaatatcttcgtttcaaaactagacagaatgattctcagaaaatcttttgtgatgcgtgcgttcaactcacagagtttaacttttcttctcatagagcagttaggaaacactctgtttgtaaagtctgcaagtggatattcagacctctttgaggccttcgttggaaacgggatttcttcatattatgctagacagaataattctcagtaacttccttgtgttgtgtgtattcaactcacagagttgaaggatcctttacagagagcaggcttgaaacactctttttgtcgaatttgcaagtggagaattcagccgctttgaggtcaatggtagaataggaaatatcttcttatagaaactagacagaatgattctcagaaactcctttgtgatgtgtgcgttcaacacacagagttcaaactttcttttcatagagcagttgggaaaaactctgtttgtaaagtctgcaagtggatattcagacttctttgaggccttcgttggaagcgggatttcttcatattctgctagacagaagaattctcagtaacctccttgtgttgcgtgcattcaactgacagggttgaaatttcatttagacagagcagatttgaaacactgtttttgtggaatttgcaagtggagatgtcaagcgctttggggccaaaggcagaaaaggaaatatcttcgtataaaaactagacagaatcattctcagaaactgctctgcgatgtgtgcgttcaactctcagagtttaacttttctttccattcagcagtttggaaacactctgtttgtaaagtctgcacgtggataatttgactacttagaggccttcgttggaaacgggtttttttcctgtaaggctagagagaagaattcccagtaactttcttgtgttgtgtacattcaactcacagaattgaacgttcccttagacagagcagatttgaaacactctgtttgtgcaattggcaagtggtgatttcatccgctttgaggtcaatggtagaaaaggaaatatcttcgtataaaaactagacagaatctttcccacaaactgccttgtgatgtgttcgttcaactcacagagtttaacctttctgttcatagagcagttaggaaacactctgtttgtaaagtctgcaagtggatattcagacctccttgaggccttcgttggaaacgggatttcttcatattctgctagacagaataattctcagtaacttccttgtgttgtgtgttttcaactcacagagttgaacgatcctttacacagagcagacttgaaacactctttttgtggaatttgcaagtggagatttcagccgctttgaggtcaatggtagaataggaaatatcttcctatagaaactagacagaatgattctcagaaactcctttgtgatgtgtgcgttcaactcacagagtttaacctttcttttcatagagcagttaggaaacactctgtttttatagtctgcaagtggatattcagacatctttgaggccttcgttggaaacgtgatttcttcatattctgctatacagaagaattctcagaaacttccttgtgttgtgtgttttcaactcacagagttgaacgatgctttacacagagtagacttgaaacactctttttgtgtaatttgcaagtagagatttcagccgctttgaggtcaatggtagaaaaggaaatatcttcgtataaaaactagacagaatcattctcagaaactgctgcgtgatgtgtgcgttcaactctcagagtttaacttttcttttcattcagcggtttggaaacactctgtttgtaaagtctgcacgtggatattttgaccacttagaggccttcgttggaaacgggttttttttcatgtaaggctagacagaagaattcccagtaacttccttgtgttgtgtgcattcaactcacagagttgaacgttcccttagacagagcagatttgaaacactctatttgtgcaatttgaaagtgtagatttcaagcgctttaaggtcaacggcagaaaaggaaatatcttcgtttcaaaactagacagaatcattcccacaaactgcgttgtgatgtgttcgttcaactcacagagttttacctttctgttcatagagcagttaggaaacactctgtttgtaaagtctgcaagtggatattcagacctcctagaggccttcgttggaaacgggatttcttcatattctgctagacagaagaattctcagtaacttccttgtgttgtgtgtattcaactcacagagttgaacgatcctttacacagagcagacttgaaacactctttttgtggaatttgcaagtggagatttcagccgctttgaggtcaatggtagaataggaaatatcttcttatagaaactagacagaatgattctcagaaactcctttgtgatgtgtgcgttcaactcacagagtttaacctttcttttcatagagcagttaggaaacactccgtttgtaaagtctgcaagtggatattcagacctctttgaggccttcgttggaaacgggtttttttcatataaggctagacagaagaattctcagtaacttccttgtgttgtgtgtattcaactcacagagttgaacgatcttttacacagaccagacttgaaacactctttttgtggaatttgcaagtggagatttcagccgctttgaggtcaatggtagaataggaaatatcttcctatagaaactagacagaatcattctcagaaactcctttgtgatgtgtgcgttcaactcacagagtttaacctttcttttcatagagcacttaggaaacactctgtttgtaaagtctgcaagtggatattcagacctccttgaggccttcgttggaaacgggatttcttcatattatgctagacagaagaattctcagtaacttccttgtgttgtgtgtattcaactgacagagttgaactttcatttagagagagcagatttgaaacactgtttttgtggaatttgtaagtggaaatttcaagcgctttggggccaaaggcagaaaaggaaatatcttcgtataaaaactagacagaatcattctcagaaactgctctgcgatgtgtgcgttcaactctcagagttaaacttttcttttcattcagcagtttggaaacactctgtttgtaaagtctgcacgtggataatttgaccacttagaggccttcgttggaaacggttttttttaatgtaaggctagacagaagaattcccagtaacttccttgtgttgtgtgcattcaactcacagagttgaacgttcccttagacagagcagatttgaaacactctatttgtgcaatttgcaagtgtagatttcaagcgctttaaggtcaatggcagaaaaggaaatatcttcgtttcaatactagacagaatgattctcagaaactcctttgtgatgtgtgcgttcaagtcgcagagtttaacctttcttttcatagagcagttaggaaacactctgtttgtaaagtgtgcaagtggatattcagacctctttgaggccttcgttggaaacgggatttcttcatattctgctagacagaagaattctcagtaacttccttgtgttgtgtgtattcaactcacagagttcaacgatcctttacacagagcagacttgaaaaaatctttttgtggaatttgcaagtggagatttcagccgctttgaggtcaatggtagaaaaggaaatatcttcgtataaaaactagacagaatgattctcagaaactcctttgtgatgtgtgcgttcaactcacagagtttcacctttcttttcatagagcagttaggaaacactctgtttgtaaagtctgcaagtggatattcagacctccttgagggcttcgttggaaacgggatttcttcatattctgctagacagaagaattcccagtaacttccttgtgttgtgtgtgttcaactcacagagttgaactttcatttacacagagcagatttgaaacactctttttgtggaatttgcaagtggagatttcaagcgctgtgaggccaaaggcagaaaaggaaatatcttcgtatagaaactagacagaatcattctcagaaactgctgcgtgatgtgtgcgttcaactcacagagtttaacttttcttttcattcagcggtttggaaacactctgtttgtaatgtctgcacgtggatattttgaccacttagaggccttcgttggaaacgggattttttcatgtaaggctagacagaagaattcccagtaacttccttgtgttgtgtacattcaactcacagagttgaacgttcccttagacagagcagatttgaaacactctttttgtgcaattggcaagtggagatttcaagcgctttaaggtcaatggcagaaaaggaaatatcttcgtttcaaaactagagagaatcattcccacaaactgcgttgtgatgtgttcgttcaactcacagagtttaacctttctgttcataaagcagttaggaaacactctgtttgtaaagtctgtaagtggatattctgacatcttgtggccttcgttggaaacgggatttcttcatattctgctagacagaagaattctcagtaacttccttgtgttgtgtgtattcaactcacagatttgaacgatcctttacacagagcagtcttgaaacactctttttgtggaatttgcaagtggagatttcagccgctttgaggtcaatagtagaaaaggaaatatcttcgtagaaaaactagacagaatgattctcagaaaatcttttgtgatgtgtgcgttcaactcacagagtttaacttttcttctcatagagcagttaggaaacactctgtttgtaaagtctgcaagtggatattcagacctctttgaggccttcggtggaaacgggatttcttcatattatgctagacagaagaattctcagtaacttccttgtgttgtgtgtgttcaactcacagagttgaactttcatttacacagagcagactttaaacactctttttgtggaatttgcaagtggagatttcaagcgctttgaggccaaaggcagaaaaggaaatatcttcgtataaaaactagacagaatcattctcataaactgctgcgtgatgtgtgccttcaactctcagagtttaacttttcttttcattcagcggtttggaaacactctgtttgtaaagtctgcacgtggatatttttgaccacttagaggccttcgttggaaacgggtttttttcatgtaaggctagacggaagaattcccagtaacttccttgtgttgtgtgcatttaactcacagagttgaacgttcccttagacagagcagatttgaaacactctatttgtgcaatttgcaagtgtagatttcaagcgctttaaggtcaatggcagaaaaggaaatatcttcgtttcaaaactagacagataatcattcccacaaactgcgttgtgatgtgttcgttcaactcacagagtttaacctttcttttcatagagcagttaggaaacagtctgtttgtaaattctgtaagtggatattctgacatcttgtggccttcgttggaaacgggatttcttcatattctgctagacagaagaattctcagtaacttcgttgtgttgtgtgtattcaactcacagagttgaacgatcctttacacagagcagacttgaaacactctttttgtggaatttgcaagtggagatttcagccgctttgaggtcaatggtagaataggaaatatcttcctatagaaactagacagaatgattctcagaaactgctttgtgatgtatgcgttcaactcacagagttcaaccattctgttcatagagcagttaggaaacactctgtttgtaaagtctgcaagtggatattcagacctctttgaggccttcgttggaaacgggatttcttcatattctgctagacagaagaattctcagtaacttccttgtgttgtgtgtattcaactgacagagttgaactttcatttagagagagcagatttgaaacactgtttttgtggaatttgcaattggagatttcaagcgctttggggccaagggcagaaaaggaaatatcttcgtataaaaactagacagaatcattctcagaaactgctgcgtgatgtgtgcgttcaattctgagagtttaacttttcttttcattcagcggtttggaaacactctgtttgtaaagtctgcacgtggaaattttgaccacttagaggccttcgttggaaacgggtttttttcatgtaaggctagacagaagaattcccagtaacttccttgtgttgtgtgcattcaactcacagagttgaacgttccctaagacagagcagatttgaaacactctatttgtgcaatttgcaagtgtagatttcaagcgctttaaggtcaacggcagaaaaggaaatatcttcgtttcaaaactagacagaatcattcccacaaactgcgttgtgatgtgtgtgttcaactcacagagtttcacctttcttttcatagagcagttaggaaacagtctgtttgtcaattctgtaagtggatattctgacatcttgtggccttcgttggaaacgggatttcttcatattctgctagacagaagaattctcagtaacttccttgtgttgtgtgtattcaactcacagagttgaacgatcctttacacagagtagacttgaaacactctttttgtggaatttgcaagtggagatttcagccgctttgaggtcaatggtagaaaaggaaatatcttcgtataaaaactagacagaatgattctcagaaacttctttgtgatgtgtgcgttcaactcatagagtttaacctttcttttcatagagcagttaggaaacactcggtttgtaaactctgcaagtggatattcagacctctttgaggccttcgttggaaacgggatttcttcatactgtgctagacagaagaattctcagtaacttcccttgtgttgtgtgtattcaactcacagagttgaacgatcctttacacagagcggacttgaaacactctttttgtgaaatttgcaagtggagatttcagccgcgttgaggtcaatggtagaaaaggaaatatcttcgtataaaaactagacagaatcattctcagaaactgctgcgtgatgtgtgcgttcaactctcagagtttaacttttcttttcattcagcggtttggaaacactctgtttgtaaagtctgcacgtggatattttgaccacttagaggccttcgttggaaacgggtttttttcatgtacggctagacagaagaattcccagtaacttccttgttttgtgtacattcaactcacagagttgaacgttcccttagatagagcagatttgaaacactctttttgtgcaattggcaagtggtgatttcagccgctttgaggtcaatggtagaaaaggaaatatcttcgtataaaaactagacagaatcattcccacaaactgcgttgtgatgtgttcgttcaactcacagagtttaacctttctgttcatagagcagttaggaaacactctgtttgtaaagtctgtaagtggatattctgacatcttgtggccttcgttggaaacgggatttcttcatattctgctacacagaagaattctcagtaacttccttgtgttgtgtgtattcaacgcacagagttgaacgatcctttacacagagcagacttgaaacactctttttgtggaatttgcaagtggagatttcagccgctttgaggtcaatggtagaaaaggaaactatcttcatataaagactagacagaatgattctcagaaactcctttgtgctgtgtgcgttcaactcacagagtttaacctttcttttcatagagcagttaggaaacactctgtttgtaaagtctgcaagtggatattcagacatctttgaggctttcgttggaaacgggatttcttcatattctgctagacagaagaattcccagtaacatccttgtgttgtgtgtgttcaactcacagagttgaactttcatttacacagagcagatttgaaacactctttttgtggaatttgcaagtggagatttcaagcgctttgaggccaaaggcagaaaaggaaatatcttcgtttcaaaactagacagaatcattctcagaatctgctgcgtgatgtgtgcgttcaactctcagagtttaacttttcttttcattcagcggtttggaaacactctgtttgtaaagtctgcacgtggaaattttgaccacttagaggccttcgttggaaacgggtttttttcatgtaaggctagacagaagaattcccagtaacttccttgtgttgtgtgcattcaactcacagagttgaacgttcccttagacagagcagatttgaaacactctatttgtgcaatttgcaagtgtagttttcaagctctttaaggtcaacggcagaaaaggaaatatcttcgtttcaaaactagagagaacgattctcagaaactcctttgtgatgtgtgcgttcacctcacagagtttaacttttcttttcatagagcagttagtaaacactctgtttgtaaagtctgcaagtggatattcagacctctttgaggccttcgttggaaacgggatttcttcatattctgctagacagaaaaattctcagtaacttccttgtgttgtgtgtattcaactcacagagttgaacgatcctttacacatagcagacttgaaacactctttttgtggaatttgcaagtggagatttcagccgctttcaggtcaatagtagaaaaggaaatatcttcgtagaaaaactagacagaatgattctcagaaactcctttgtgatgtgtgtgttcaactcacagagtttaacctttcttttcatagagcagttagtaaacactctgtttataaagtctgcaagtgtatattcagacccctttgaggccttcgttggaaacgggatttcttcatattatgctagacagaagaattctcagaaacttccttgtgttgtgtgtattcaactcacagagttgaacgatcctttacacacagcagacttgagacactctttttgtggaatttgtaagtggagatttcagccgctttgaggtcaatggtagaaaaggaaatatcttcatataaaaactagacagaatcattctcagaaactgctctgcgatgtgtgcgttcaactctcagagtttaactttgcttttcattcagcagtttggaaacactctgtttgtaaagtctgcacgtggatattttgaccacttagaggccttcgttggaaacgggtttctttcctgtaaggctagatagaagaattctcagtaacttccttgtgttgtgtacattcaactcacagagttgaacgttcccttagacagagcagatttgaaacactctttttgtgcaattggcaagtggtgatttcagccgatttgaggtcaatggtagaaaaggaaatatcttcgtagaaaaactagacagaatcattcccacaaactgcgttgtgatgtgttcgttcaactcacagagtttaaccattcttttcatagagcagttaggaaacagtctgtttgtaaattctgtaagtggatattctgacatcttgtggccttcgttggaaacgggatttcttcatattctgctagacagaaggattctcagtaacttccttgtgttgtgtgtattcaactcacagagttgaacgatcctttacacagagcagacttgaaacactctttttgtggaatttgcaagtgcagatttcagccgctttgaggtcaatggtagaaaaggagatatcttcgtataaaaactagacagaaatgattctcagaaactcctttgtgatgtgtgcgttcaactcacagagtttaacctttctgttcatagagcagttaggaaacactctgtttgtaaagtctgcaagtggatactcagaacctccttcaggcattcgttggaaacgggatttcttcatattctgctagacagaagaattctcagtaacttcccttgtgttgtgtgtattcaactgacagagttgaactttcagttagagagagcagatttgaaacactgtttttgtggaatttgcaagtggagatttcaagcgctttggggccaaaggcagaaaacgaaatatcttcgtataaaaagtagacagaatcattctcagaaactgctctgcgatgtgtgcgttcaactctcagagtttaacttttcttttcattcagcagtttggaaacactctgtttgtaaagtctgcacgtggatattttgaccagttagaggccttcgttggaaacgggtttttttcctgtaaggctagacagaagaattcccagtaacttccttgtcttgtgtacattcaactcacagagttgaacgttcccttagacagagcagatttgaaacactctttttgtgcaattggcaagtggagatttcaagcgctttaaggtcaatggcagaaaaggaaatatcttcgtttcaaaactagagagaatcattcccaaaaactgcgttgtgatgtgttcgttcatctcacagagtttaacctttcttttcatacagcagttaggaaacagtctgtttgtaaattctgtaagtggatattctgacatcttgtggccttcgttggaaacgggatttcttcatattctgctagacagaagaattctcagtaacttccttgtgttgtgtgtattcaactcacagagttgaacgatcctttacacagggcggacttgaaacactctttttgtggaatttgcaattggagatttcagccgctttgaggtcaatggtagaaaaggaaatatcttcgtataaaaactagacagaatgattctcagaaacttcattgtgacgtgtgcgttcaactcacagagtttaacatttcttttcatagagcagttaggaaacactctgtttgtaaagtctgcaagtggatattcagacctctctgaggccttcgttggaaacgggatttcttcatactgtgccaaacagaagaattcccagtaacttccttgtgttgtgtgtgttcaactcacagagttgaactttcatttacacagagcagattggaaacactctttttgtggaatttgcaagtggagatttcaagcgctttgagaccaaaagcagaaaaggaaatatcttcgtataaaaactagacagaatcattctcagaacctgctctgcgatgtgtgcgttcaactctcagagtttaacttttcttttcattcagcagtttggaaacactctgtttctaaagtctgcacgtggatattttgaccacttagaggccttcgttggaaacgggtttttttcctgtaaggcttgacagaagaattcccagtaacttccttgtgttgtgtacattcaactcacagagttgaacgttcccttagacagagcagatttgaaacactctttttgtgcaattggcaagtggtgatttcagccgctttgaggtcaatggtagaaaaggaaatatcttcgtataaaaactagacagaatgattctcagaaacttcattgtgatgtgtgcgttcaactcacagagtttaacctttcttttcatagagcagttaggaaacactctgtttgtaaactctgcaagtggatattcagacctctttgctgccttcgttggaaacgggatttattcatactgtgctagacagaagaattctcagtaacttccttctgttgtgtgtattcaactcacagagttgaacgatcctttacacagagcggacttgaaacactctttttgtggaatttgcaagtggagatttcagccgcgttgaggtcaatggtagaaaaggaaatatcttcgtataaaaattagacagaatgattctcataaactcctttgtgatgtgtgcattcaactcacagagtttcacctttcttttcatagagcagttgggaaacactctgtttgtaaagtctgcaagtagatattcagacctccttgaggccttcgttggaaacgggatttcttcatattctgctagacagaagaattctcagtaacttccttgtgttgtgtgtattcaactgacagagttgaactttcatttagagagagcagatttgaaacactgtttttgtggaagttgcaagtggagatttcaagcgctttggggccaagggcagaaaaggaaatatcttcgtataaaaactagacagataatcattctcagaaactgctctgcgatgtgtgcgttcaactctcagagtttaacttttcttttcattcagcagtttggaaacactctgtttgtaaagtctgcacgtggatattttgaccatttagaggccttcgttggaaacgggtttttttcttgtaaggctagacagaagaattcccaggaacttccttgtgttgtgtacattcaactcacagagttgaacgttcccttagacagagcagatttgaaacactctttttgtgcaattggcaagtggtgatttcagccgctttgaggtcaatggtagaaaaggaaatatcttcgtataaaaactagacagaatcattcccacaaactgcgttgtgatgtgttcgttcaactcacagagtttaacctttcttttcatagagtagttaggaaacactctgtttgtaaagtctgcaagtggatattcagacctctttgaggccttcgttggaaacgggatttcttcatgttctgccagacagaataattctcagtaacttccttgtgttgtgtgtattctactcacagagttgaacgatcctttacacagagcagacttgaaacactctttttgtggaatttgcaagtggagatttcagccgctttgaggtcaatggtagaataggaaatatcatcctatagaaactagaccgaatgattctcagaaactcctttgtgatatgtgctttcaactcatagagttcaacctttcttttcatagagcacttgggaaacactctgtttgtaaagtctgcaagtggatattcagacttctttgaggccttcgttggaagcgggatttcttcatgttctgctagacagaagaattctcagtaacttaccttgtgttgtgtgtattcaactcacagagttgaatgatcctttacacagaacagtcttgaaacactctttttgtggaatttgctagtggagatttcagccgctttgatgtcaatggtagaataggaaatatcttcctatagaaactagacagaatgattctcagaaactcctttgtgatgtgtgtgttcaactcacagagtttaacctttcttttcatagagcagttaggaaacactctgtttgtaaagtctgcaagtggatattcagacctttttgagaccttcgttggaaacgggattttttcatataaggctagacagaagaattcccagtaacttccttgtgttgtgtgtgttcaactcacagagttgaactttgatttacacagagcagatttgaaacactctttttgtggaatttgcaagtggagatttcaagcgctttgaggccaaaggcagaaaaggaaatatcttcgtatgaaaactagacagaatcattctcagaaactgctgcgtgatgtgtgcgttcaactctcagagtttaacttttcttttcattcagcggtttggaaacactctgtttgtaaattctgcacgtggaaattttgaccacttagaggccttcgttggaaacgggtttttttcatgtaaggctagacagaagaattcccagtaacttccttgtgttgtgtacattcaactcacagagttgaacgttcccttagacagagcagatttgaaacactctttttgtgcaattggcaaatggagatttcaagcgctttaaggtcaatggcagaaaaggaaatatcatcgtttcaaaactagacagaatcattcccacaaactgcgttgtgatgtgttcgttcaactcacagagtttaacctttctgttcatagagcagttaggaaacactctgtttgtaaagtctgaaagtggatattctgacatccttgtggccttcgttgggaacgggatttcttcatattctgctagacagaagaattctcagtaacttccttgtgttgtgtgtattcaactcacagagttgaacgatcctttacacagagcagacttgaaacactcttgttgtgtaatttgcaagtggagatttcagccgctttgaggtcaatggtagaataggaaatatcttcctatagaaactagacagaatgattctcagaaactcctttgtgatgtgtgcgttcaactcacagagtttaacctttcttttcatagagcagttaggaaacactctgtttgtaaagtctgcaagtggatatacagacctctttgaggccttcgttggaaaccggatttcttcatattctgctagagagaagaattctcagtaacttccttgtgttgtgtgtattcaacttacagaggtgaacgatcctttacacagagcagacttgaaacactctttttgtggaatttgcaagtggagatttcagccgctttgaggtcaatggtagaaaaggaaatatcttcgtataaaaactagacagaatgattctcagaaactcctttgtgatgtgtgtgttcaactcacagagtttaacctttcttttcatagagcagttaggaaacactctgtttgtaaagtctgcaagtggatattttgacctctttgaggccttcgttggaaacgggttttttcatgtaaggctagacagaagaattctcagtaacttccttgtgttgtgtgtattcaactgacagagttgaactatcatttagagagagcagatttgaaacactgtttttgtggaatttgcaagtggagatttcaagcgctttggggccaaaggcagaaaaggaaatatcttcgtataaaaactagacacaatcattctcagaaactgctctgcgaagtgtgcgttcaactctcagagtttaacttttcttttcattcagcagtttggaaacactctgtttgtaaagtctgcacgtggataatttgaccacttagaggccttagttggaaacgggtttttttcatgtaaggctagacagaagaattcccagtaacttccttgtgttgtgtgcattcaactcacagagttgaactttcctttagacagagcagatttgaaacactctatttgtgcaatttgcaagtgtagatttcaagcgctttaaggtcaatggcagaaaaggaaatatcttcgtttcaaaactagacagaatcattcccacaaactgcgttgtgatgtgttcgttcaactcacagagtattaacctttctgttcatagagcagtgaggaaacactctgtttgtaaagtctgtaagtggatattctgacatcttgtggccttcgttggaaacgggatttcttcatattctgctagacagaagaattctcagtaacttctttgtgttgtgtgtattcaactcacagagttgaacgatcctttacacagagcagacttgaaacactctttttgtggaatttgcaagtggagatttcagccgctttgaggtcaatggtagaataggaaatatcttcctatagaaactagacagaatgattctcagaaactcctttgtgatgtttgcgttcaactcacagagtttaacatttcttttcatagagcagttaggaaacactctgtttatatagtctgcaagtggatattcagacctccttgaggccttcgttggaaacggggtttcttcatattctgctagacagaagaattctcagtaacttccttctgttgtgtgtattcaactgacagagttgaactttcatttagagagagcagatttgaaacactgtttttgtggaatttgcaagtggagatttcaagcgctttggggccaaaggcagaaaggaaatatcttcgtataaaaactagacagaatcattctcagaaactgctctgtgatgtgtgcgttcaactctcagagtttaacttttcttttcattcagcagtttggaaacactctgtttgtaaagtctgcacgtggatattttgaccacttagaggccttcgttggaaacgggttttcttcatgtaaggctagacagaagaattcccagtaacttccttgtgttgtgtgcattcaattcacacagatgaacgttcccttagacagagcagatttgaaacactctatttgtgcaatttgcaagtgtagatttcaagcgctttaaggtcaatggcagaaaaggaaatatcttcgtttcaaaactagacagaatgattctcagaaactcctttgtgatgtgtgcgttcaactcacagagtttaacctttcttttcatagagcagttaggaagcactctgttagtaaagtctgcaagtggatattcagacctccttgaggccttcgttggaaaggggatttcttcatattatgctacacagaagaattctcagtaactttccttgtgttgtgtgtattcaactcacagagttgaacgatcctttacacagagcagacttgaaacactctttttgtggcatttgcaagtggagatttcagccgctttgagttcaatggtagaataggaaatatcttcctatagaaactagacagaatgattctcagaaactcctttgtgatgtgtgtgttcaactcacagagtttaacctttcttttcatagagcagttgggaaacactctgtttgtaaagtctgcaagtggatattcagacatccttgaggctttcgttggaaacgggatttcttcatattctgctagaaagaagaattctcagaatcttccttgtgttgtgtgtattcaactcacagagttgaacgatcctttacacagagcagacctgaaacactctttttgtggaatttacaagtggagatttcagccgctttgaggtcaatggtagaaaaggaaatatcttcgtataaaaactagacagaatgattctcagaaactcctttgtgatgtgtgcgttctactcacagagtttaacctttcttttcatagagcagttaggaaacactctgtttgtaaagtctgcaagtggatattcagacatctttgagactttcgttggaaacgggatttcttcatattctgctagacagaagaattcccagtaacttccttgtgttgtgtgtgttcaactcagagagttgaactttcatttacacagagcagatttgaaacactctttttgtggaatttgcaagtggagatttcaagcgctttgaggccaaaggcagaaaaggaaatatcttcgtataaaaactagacagaatcattctcagaaacttctctgcgatgtgtgcgttcaactctcagagtttaacttttcttttcgttcagcagtttggaaacactctgtttgtaaagtctgcacgtggatattttgaccacttagaggccttcgttggaaacgggtttttttcctgtaaggctagacagaagaattcccagtaacttccttgtgttgtgtacattcaactcacagagttgaacgttcccttagacagagcagatttgaaacactctttttgtgcaattagcaagtggagatttcaagcgctttaaggtcaatggcagaaaaggaaatatcttactttcaaaactagacagaaatcattcccacaaactgcgttgtgatgtgttcgttcaactcacagagtttaacctttctgttcatagagcagttaggaaacactctgtttgtaaagtctgtaagtggatattctgatatcttgtggccttcgttggaaacgggatttcttcatattctgctagacagaagcaattctcagtaacttccttgtgttgtgtgtattcaactcacagagttgaaggatcctttacagagggcaggcttgaaacactctttttgtcgaatttgcaagtggagatttcagccgctttgaggtcaatggtagaataggaaatatcttcttatagaaactagacagaacgattctcagaaactcctttgtgatgtgtgcgttcaactcacagagtttaacctttcttttcatagagcagttacgaaacactctgtttgtaaagtctgcaagtggatattcagacctctttgaggccttcgttggaaacgggatttcttcatattctgctagacagaagaattctcagtaacttccttgtgttgtgtttattcaactcacagagttgaatgatcctttacacagagcagacttgaaacactctttttgtggaatttgcaagtggagatttcagccgctttgaggtcaatggtagaaaagtaaataccttcctataaagactagacagaatgattctcagaaactcctttgtgatgtgtgccttcaactcacagagtttaacctttcttttcatagagcagttaggaaacactctgtttgtaaagtctgcaagtggatattcagacctctttgaggccttcgttggaaacgggtttttttcatataaggctagacagaagaattctcagaaactttccttgtgttgtgtgtattcaactcacagagtagaacgatcctttacacagagcagacttgaaacactctttttgtggaatttgcaagtggagatttcagccgatttgaagtcaatggtagaaagggaaatatcttcgtatagaaactagacagaattattctcagaaactcctttgtgatgtgtgcgttcaactcacagagtttaacctttctgttcatagagcagttaggaaacactctgtttgtaaagtctgcaagtggatattcagacctccttgaggccttcgttggaaacgggatttcttcatattctgctagacagaagaattctcagaaacttccttgtgttgtgtgtattcaactcacagagttgaaggatcctttacacagagcagacttgaaacactctttttgtggaatttgcaagtggagatttcagccgctttgtggtcaatggtagaaaaggaaatatcttcgtataaagactagacagaatgattctcagaaacttctttgtgatgtgtgcgttcagctcacagagtttaacctttcttttcatagagcagttaggaaacactctgtttgtaaactctgcaagtggatattcagacctctttgaggccttcgttggaaacgggatttcttcatactatgctagacagaagaattcccactaacttccttgtgttgtgtgtgttcaactcacagagttgaactttcatttacacagagcagatttgaaacactctttttgtggaatttgcaagtggagatttcaagcgctgtgaggccaaaggcagaaaaggaagtatcttcgtataaaaactagacagaatcattctcagaaactgctctgtgatgtgtgcgttcaactctcagagtttaacttttcttttcattcagcagtttggaaacactctgtttgtaaagtctgcacgtggataatttgaccacttagaggccttcgttggaaacgggtttttttcatgtaaggctagacagaagagttctcagtaacttccttgtgttgtatgtattcaactcacacagttgaacgatcctttacagagagcagacttgtaacactctttttgtggaatttgcaagtggagatttcagccgctttgaagtcaaagtagaaaaggaaatatcttcctataaaaactagacagaatgattctcagaaaatcttttgtgatgtgtgcgttcaactcacagagtttaacttttcttctcatagagcagttaggaaacactctgtttgcaaagtctgcaagtggatattcagacctctttgaggccttcgttggaaacgggatttcttcaaattatgctagacagaagaattctcagtaacttccttgtgttgtgtgtattcaactcacagagttgaacgatcctttacacacagcagacttgaaacactctttttgtgtaatttgcaactggagatttcagccgctttgaggccaatagtagaaaaggaagtatcttcgtagaaaaactagacagaatgattctcagaaaatcttttgtgatgtgtgcgttcaactcacagagtttaacttttcttctcatagagcagttaggaaacactctgtttgtaaagtctgcatgtggatattcagacctctttgaggccttcgttggaaacgggatttctacatattatgctagacagaagaattctcagtaacttccttgtgttgtgtgtattcaactgacagagttgaactttcatttagagagagcagatttgaaacactgtttttgtggaatttgcaagtggagatttcaagcgctttggggccaaaggcacaaaaggaaatatcttcgtataaaaactagacagaatcattctcagcaaactgctgcgtgatgtgtgcgttcaactctcagagtttaacttttcttttcattcagcggtttggaaacactctgtttgtaaagtctgcacgtggaaattttgaccacttagaggccttcgttggaatcgggtttttttcatgtaaggctagacagaagaattcccagtaacttccttgtgttgtgtacattcaactcacagagttgaacgttcccttagacagagcagatttgaaacactctttttgtgcaattggcaagtggagatttcaagcgctttaaggtcaatggcataaaaggaattatcttcgtttcaaaactagacagaatcattcccaaaaactgcgttgtgatgtgttcgttcaactcacagagtttaacctttctgttcatagagcagttaggaaacactctgtttgtaaagtctgtaagtagatattctgacatcttgtggccttcgttggaaacgggatttcttcatattctgctagacagaagaaatctcagtaacttccttgtgttgtgtgtattcaactcacagagttgaacgatcctttacacagagcggacttgaaacacactttttgtggaatttgcaagtggagatttcagccgcgttgaggtcaatggtagaaaaggaaatatcttcgtataaaaactagacagaatgattctgagaaactcctttgtgatgtgtgcgttcaactcacagagtttaacctttcttttcatagagcagttaggaaacactctgtttgtaatgtgtgcaagtggatattcagacctccttgaggcctttgttggaaacgggatttcttcatattatgctagacaaaagaattctcagtaacttccttgtgttgtgtgtattcaactcacagagttgaacgatcctttacacagattggacttgaaacactctttttgtggaatttgcaagtggagatttcagccgcgttgaggtcaatggtagaaaaggaaatatcttcgtataaaaactagacagaatgattctcagaaactcctttgtgatgtgtgtgttcaactcacagagtttaacctttcttttcatagagcagttaggaaacactctgtttgtaaagtctgcaagtggatattcagacctctttgaggccttcgttggaaacgggattttttcatataaggctagacagaagaattcccagtaactttccttgtgttgtgtgtgttcaactcacagagttgaactttcatttacacagagcagatttgaaacactctttttgtggaatttgcaagtggagatttcaagcgctttgaggccaaaggcagaaaaggaaatatcttcgtttgaaaactagacagaatcattctcagaaactgctctgcgatgtgtgcgttcaactctcagagtttaacttttcttttcattcagcagtttggaaacactctgtttgtaaagtctgcacgtggataacttgaccacttagaggccttcgttggaaacgggttttttcatgtaaggctagacagaagaattcccagtaacttccttgtgttgtgtacattcaactcacagagttgaacgttcccttagacagagcagatttgaaacactctttttgtgcaattggcaagtggagatttcaagcgcttaaggtcaatggcagaaaaggaaatatcttcgtttcaaaactagacagaatgattctcagaaactcctttgtgatgtgtacgttcaactcacagagtttaacctttcttttcatagagcagttaggaaacactctgtttgtaaattctgtaagtggatattctgacatcttgtggccttcgttggaaacgggatttcttcatattctgctagacagaagaattctcagtagcttccttgtgttgtgtactttcaactcacagagttgaacgatcctttacacaggagcagattagaaacactctttttgtggaatttgcaagtggagatttcagccgctttgaggtcaatggtagaaaaggaaatatcttcataaaaaaactagacagaatgattctcagaaactcctttgtgatgtgtctgttcaactcacagagtttaacctttcttttcatagagcagttaggaaacactctgtttgtaaagtctgcaagtggatattcagacctctttgaggccttcgttggaaacgggtttttttcatataaggctagacagaagaattcccagtaacttccttgtgttgtgtgtgttcaactcacagagttgaactttcatttacacagagcagattggaaacactctttttgtggaatttgcaagtggagatttcaagcgctttgaggccaaaggcagaaaaggaaatatcttcgtataaaaactagaccgaatcattctcagaaactgctctgtgatgtgtgcgttcaactctcagagtttaacttttcttttcattcagcagtttggaaacactctgtttgtaaagtctgcacgtggataatttgaccacttagaggccttcgttggaaacgggtttttttcatgtaaggctagacagaagatttctcagtaacttccttgtgttgtgtgtattcaactcacacagttgaacgatcctttacacagagcagacttgtaacactctttttgtggaatttgcaagtggagatttcagccgctttgaagtcaaaggtagaaaaggaaatatcttcctataaaaactagacagaatcattcccacaaactgcgttgtgatgtgttcgttcaactcacagagtttaacctttctgttcatagagcagttaggaaacactctgtttgtaaagtctgtaagtggatattctgacatcttgaggccttcgttggaaacgggatttcttcatattctgctagagagaagaattctcagaaacttccttgtgttgtgtgtattcaactcacagagttgaacgatcctttacacagagcagacttgaaacacactttttttggtattttcaagtggagatttcagcagctttgagttcaatggtagaaaaggaaatatattcgtataaagactagacagaatgattctcagaaactactttgcgatgtgtgcgttcaactcacagagtttaacctttcttttcatagagcagttaggaaacactctgtttgtaaagtctgcaagtggatattcagacctccttgaggccttcgttggaaactggatttcttcatattatgctagacagaataattctcagtaacttccttgtgttgtgtgtattcaactcacagagttgaaggatcctttacagagagcaggcttgaaacactctttttctcgaatttgcaagtggagatttcagctgctttgaggtcaatggtagaataggaaatatcttcttatagaaactagacagaatcattctcagaaactgctctgcgatgtgtgcgttcaactctcagagtttaacttttcttttcattcagcagtgtggaaacactctgtttgtaaagtctgcacgtggatattttgaccacttagaggccttcgttggaaacgggtttttttccctgtaaggctagacagaagaattcccagtaacttccttgtgttgtgtgcattcatctcacagagttgaacgttcccttagacagagcagatttgaaacactctatttgtgcaatttgcaagtgtagatttcaagcgctttaaggtcaatggcagaaaaggaaatatcttcgtttcaaaactagacagaatcattcccacaaactgcgttgtgatgtgttcgttcaactcacagagtttaaccttccttttcatagagcagttaggaaacactctgtttgtaaagtctgcaagtggatattcagacctccttgaggccttcgttggaaacgggatttcttcatattctgctagacagaagaattctcagtaacttccttgtgttgtgtgtattcaactcacagagttgaacgatcctttacacagagcagacttgaaacactctttttgtggaatttgcaagtggagatttcatccgctttgaggtcaatggtagaataggaaatatcttcctatagaaaatagacagaatgattctcagaaactccgttgtgatgtgtgcgttcaactcacagagtttaacctttcttttcatagagcagttgggaaacactctgtttgtaaagtctgcaagtggatattcagacctccttgaggctttcgttggaaacgggatttcttcatattctgctagaaagaagatttctcagaaacttccttgtgttgtgtgttttcaactcacagagttgaacgatcctttacacagagcagacttgaaacactctttttgtggaatttgcaagtggagatttcagccgctttgaggtcaattgtagaaaaggaaatatcttcgtataaaaactagacagaatgattctcagaaactcctttgtgatgtgtgcattcaactcacagagtttaacctttcttttcatagagcagttaggaaacactctgtttgtaaagtctgcaagtggatattcagacctctttgatgccttcgttggaaacgggatttcttcatattctgctagacagaagaattcccagtaacttaccttgtgttgtgtacattcaactcacagagttgaacgttcccttagacagagcagatttgaaacactctttttgtgcaattggcaagtggagatttcaagcgctttaaggtcaatggcagaaaaggaaatatcttcgtttcaaaactagacagaatcattcccacaaactgcgttgtgatgtgttcgttcaactcacagagtttaacctttctgttcatagagcagtcaggaaacactctgtttgtaaagtctgtaagtggatattctgacatcttgtggccttcgttggaaacgggatttcttcatattctgctagacagaagaattctcagtaacttccttgtgttgtgtttattcaactcacagaggtgaatgatcctttacacagagcagacttgaaacactctttttgtggaatttgcaagtggagatttcagccgctttgaggtcaatggtagaaaagtaaatatcttcgtataaagactagacagaatgattctcagaaactcctttgtgatgtgtgcgttcaactcacagagtttaacttttcttttcatagagcagttaggaaacactctatttgtaaagtctgcaagtggatattcagacctctttgaggccatcgttggaaacgggatttcttcatattatgctagacagaagaattctcagtaacttccttgtgttgtgtgtattcaactcacagagttgaacgatcctttacacagagcagacttgaaacactctttttgtggaatttgcaagtggagatttcagccgctttgaggtcaatggtagaataggaactatcttcctatagaaactagacagaacgattctcagaaactcctttgtgatgtgtgcgttcaactcacagagtttaacctttcttttcatagagcagttaggaaacactctgtttgtaaagtctgcaagtggatattcagacccctttgaggcctgcgttggaaacgggatttcttcatattctgctagacagaagaattcccagtaacttccttgtgttgtgtgtgttcaactcacagagttgaactttgatttacacagagcagatttgaaacactctttttgtggaatttgcaagtggagatttcaagcgctttcaggccaaaggcagaaaaggaaatatcttcgtataaaaactagacagaatcattctcagaaactcctctgcgatctgtgcgttcaactctcagagtttaacttttcttttcattcaccagtttggaaacactctgtttgtaaagtctgcacgtggatattttgaccacttagaggccttcgttggaaacgggtttttttcctgtaaggctagacagaagaattcccagtaacttccttgtgttgtgtgcattcaactcacagagttgaacgttcccttagacagagcagatttgaaacactctatttgtgcaatttgcaagtgtagatttcaagtgtttaaggtcaatggcagaaaaggaaatatcttcgtttcaaaactagacagaatcattcccacaaactgcgttgtgatgtgttcgttcaactcacagagtttaacctttcttttcatagagcagttaggaaacactctgttggtaaattctgtaagtggatattctgacatcttgtggccttcgttggaaacgggatttcttcatattctgctacacagaagaattctcagaatcttccttgtgttgtgtgtattcaactcacagagttgaacgatcctttacacagagcagacttgaaacactctttttgtagaatttgcaagtggagatttcagccgctttgaggtcaatggtagaaaaggaaatatcttcgtataaaaactagacagaatgattctcagaaactcctttgtgatgtgtgcgttcaactcacagagtttaaacctttcttttcatagagcagttaggaaacactctgtttgtaaagtctgcaagtggatattcagacatctttgaggctttcgttggaaacgggatttcttcatattctgctagacagaagaattctcagtaacttccttgtgttgtgtgtattcaactcacagagttgaacgatcctttacacagagcaggcttgaaacactctttttgtggaatttgcaagtggagatttcagccgctttgagttcaatggtagaaatggaaatatcttcctatagaaactagacagaatgattctcagaaacttctttgtgatgtgtgtgttcaactcacagagtttaacctttcttttcatagagcagttaggaaacactctgtttgtaaagtctgcaagtggatattcagacctctttgaggccttcgttggaaacgggtttttttcatataaggctagacagaagaattcccagtaacttcccttgtgttgtgtgtgttcaactcacagagttgaactttcatttacccagagcagatttgaaacactctttttgtggaatttgcaagtggagatttcaagcgctttgaggccaaaggcagaaaaggaaatatcttcgtttcaaaactagacagaatcattctcataaactgctgcgtgatgtgtgcgttcaactctcagagtttaacttttctttttattcagcggtttggaaacactctgtttgtaaagtctgcacgtggatattttgaccacttagaggccttcgttggaaacgggtttttttcatgtaaggctagacagaagaattcccaataacttccttgtgttgtgtacattcaactcacagagttgaacgttcccttagacagagcagatttgaaacactctttttgtgcaattggcaagtggagatttcaagcgctttaaggtcaatggcagaaaaggaaatctcttcgtttcaaaactagacagaaatcattcccacaaactgcgttgtgatgtgttcgttcaactcacagtagtttaacctttctgttcatagagcagttaggaaacactctgtttgtaaagtctgtaagtggatattctgacatcttgtggccttcgttggaaacgggatttcttcgtattctgctagacagaagaattctcagtaacttccttgtgttgtgtgtattcaactcacagagttgaacgatcctttacacagagcggacttgaaacacactttttgtggaatttgcaagtggagatttcagccacgttgaggtcaatggtagaaaaggaaatatcttcgtataaaaactagacagaatgattctcagaaactcctttgtgatgtgtgtgttcaactcacagagtttaacctttcttttcatagagcagttaggaaacactctgtttgtaaagtctgcaagaggatattcagacctctttgaggccttcgttggaaacgggtttttttcatataaggctagacagaagaattcccagtaacttccttgtgttgtgtgtgttcaactcacagagttgaactttcatttacacagagcagatttgaaacactctttttgtggaatttgcaagtggagatttcaagcgctttgaggccaaaggcagaaaaggaaatatcttcttttcaaaactagacagaatcattctcagaaactgctctgcgatgtgtgcgttcaactctcagagtttaacttttcttttcattcagcagtttggaaacactctggttgtaaagtctgcacgtggataacttgaccacttagaggccttcgttggaaacgggtttttttcctgtaaggctagacagaagaattcccagtaacttccttgtgttgtgtacattcaactcacagagttgaacgttcccttagacagagcagatttgaaatactctttttatgcaattggcaagtggaaatttcaagcgctttaaggtcaatggcagaaaaggaaatatcttcgtttcaaaactagacagaatcattcccacaaactgcgttgtgatgtgttcgttcaactcacagagtttaacctttctgttcatagagcagttaggaaacactctgtttgtaaagtctgtaagtggatattctgacatcatgtggccttcgttggaaacgggatttcttcatattctgctagacagaagaattctcagtaacttccttgtgttgtgtttattcaactcacagagttgaatgatcctttacacagagcagacttgaaacactctttttgtggaatttgcaagtggagatttcagccgctttgaggtcaatggtagaaaagtaaatatcttcggataaacactagacagaatgattctcagaaactcctttgtgatgtgtgtgttcaactcacagagtttaacttttcttttcatagagcagttaggaaacactctgtttgtaaagtctgcaagtggatattcagacctctttgaggccttcgttggaaacgggatttcttcatattctgctagacagaagaattcccagtaacttccttgtgttgtgtgtgttcaactcacagagttgaactttcatttacacagagcagatttgaaacactctttttgtggaatttgcaagtggagatttcaagcgctttgaggccaaaggcagaaaaggaaatatcttcgtttcaaaactagactgaatcattctcagaaactgctctgcgatgtgtgcgttcaactctcagagttcaacttttcttttcattcagcagtttggaaacactctgtttgtaaagtctgcacgtggataatttgaccacttagaggccttcgttggaaacggtttttttttcatgtaaggctagacagaagaatttcccagtaacttccttgtgttgtgtgcattcaactcacagagttgaacgttcccttagacagagcagatttgaaacactctatttgtgcaatttgcaagtgtagatttcaagcgctttaaggtcaatggcagaaaaggaaatatcttcgtttcaaaactagacagaatcattcccacaaactgcgttgtgatgtgttcgttcaactcacagaagtttaacctttcttttcatagagcagttaggaaacagtctgtttgtcaattctgtaagtggatattctgacatcttgtggtcttcgttggaaacgggatttcttcatattctgctagacagaagaattctcagtaacttccttgtgttgtgtgtattcaactcacagagttgaacgatcttttacacagagcagacttgaaacattctttttgtggaatttgcaagtggagatttcagccgctttgaggtcaatggtagaataggaaatatcttcctatagaaactagacagaatgattctcataaactcctttgtgatgtgtgcattcaactcacagagtttcacctttcttttcatagagcagttaggaaacactctgtttgtaaagtctgcaagtggatattcaggcctcttgaggccttcgttggaaacgggatttcttcatattctgctagacagaataattctcagtaacttccttctgttgtgtgtattcaactcacagagttgaaggatcctttacagagagcaggcttgaaacactctttttgtcgaatttgcaagtggagatttcagccgctttgaggtcaatggtagaataggaaatatcttcttatagaacctagacaaaatgattctcagaaacttctttgtgatgtgtgcgttcaactcacagagtttaacctttcttttcatagagcagttaggaaacactctgtttgtaaactctgcaagtggatattcagacctctttgaggccttcgttggaaacgggatttcttcatactatgatagacagaagaattctcagtaacttctttgtgttgtgtgtattcaactcacagagttgaacgatcctttacacagagcagacttgaaacactctatttgtagaatttgcaagtggagatttcagccgctttgaggtcaatagtagaaaaggaaatatcttcgtagaaaaactagacagaacgattctcagaaactcctttgtgatgtgtgcgttcaactcacagagtttaacctttcttttcatagagcagttaggaaacactctgtttgtaaagtctgcaagtggatattcagacctctttgagaccttcgttggaaacgggatttcttcatattctgctagacagaagaattctcagtaactttccttgtgttgtgtgtattcaactgacagagttgaactttcatttagagagagcagatttgaaacactgtttttgtggaatttgccagtggagatttcaagcgctttggggccaaaggcagaaaaggaaatatcttcgtataaaaactagacagaatcattctcagaaactgctctgcgatgtgtgccttcagctctcagagtttaacttttcttttcattcagcagtttggaaacactctgtttgtaaagtctgcacgtggatattttgaccacttagaggtcttcgttggaaacgggtttttgtcatgtaaggctagacagaagaattcccagtaacttccttgtgttgtgtgcattcaactcacagagttgaacgttcccttagacacagcagatttgaaacactctatttgtgcaatttgcaagtgtagatttcaagcgctttaaggtcaatggcagaaaaggaaatatcttcgtttcaaaactagacagaatcattcccacaaactgcgttgtgatgtgttcgttcaactcacagagtttaacctttctgttcatagagcagttaggaaacactctgtttgtaaagtctgtaagtggatattcagacctccttgaggctttcgttggaaacgggatttcttcatattctgctagacagaggaattctcagtaacttccttgtgttgtgtgtattcaactcacagagttgaacgatcctttacccagagcagacttgaaacactctttttgtggaatttgcaagtggagatttcagccgctttgaggtcaatggtagaataggaaatatcttcctatagaaactagacagaattattctcagaaactcctttgtgatgtgtgcgttcaactcacagagtttaacctttcttttcatagagcagttaggaaacactctgtttgtaaagtctgcaagtggatattcagacctctttgaggccttcgttggaaacgtgatttcttcatattctgctagacagaaagaattctcagtaacttccttgtgttgtgtgtattcaactcacagagttgaacgatcctttacacagagcagacttgaaacactctttttgtggaatttgcaagtgaagatttcagccgctttgaggtcaatggtagaataggaaatatcttcctatagaaaatagacagaatgattctcagaaactcccttgtgatgtgtgcgttcaactcacagagtttaacctttcttttcatagagcagttaggagacactctgtttgtaaagtctgcaagtggatattcggacctctttgaggccttcattggaaacgggatttcttcatattctgctagacagaagaattctcagtaacttctttgtattgtgtgtattcaactcacagagttgaacgatcctttacacagagcagacttgaaacactctttttgtggaatttgcaagtggagatttcatccgatttgaggtcaatggtagaataggaaatatcttcctatggaaactagacagaatgattctcagaaactcctttgtgatgcgtgtgttcaactcacagagtttaacctttcttttcatagagcagttagtaaacactctgtttataaagtctgcaagtggatattcagacccctttgaggccttcgttggaaacgggatttcttcatattatgctagacagaagaattctcagtaacttccttgtgttgtgtgtattcaactgacagagttgaactttcatttagagagagcagatttgaaacactgtttttgtggaatttgcaagtggagatttcaagcgctttggggccaaaggcagaaaaggaaatttcttcgtataaaaactagacagaatcattctcagaaactgctgcgtgatgtgtgcgttcaactctcagagtttaacttttcttttcattcagcggtttggaaatactctgtttgtaaagtctgcacgtggacattttgaccacttagaggccttctttggaaacgggtttttttcatgcaaggctagacagaagaattcccagtaacttccttgtgttgtgtgcattcaactcacagagttgaacgttcccttagacagagcagatttgaaacactctatttgtgcaatttgcaagtgtagatttcaagcgcattaaggtcaatggcagaaaaggaaatatcttcgtttcaaaattagacagaatcattcccacaaactgcgttgtaatgtgtgcgttcaactcacagagtttaacctttcttttcatagagcagttaggaaacactctgtttgtaaagtctgcaagtggatattcagacctctttgaggccttcgttggaaacgggatttcttaatattctgctagacagaagaattctcagtaacttccttgtgttgtgtgtattcaactcacagagttgaacgatcctttacaaagagcagacttgaaacactctttctgtggaatttgcaattggagatttcagccgctttgaggacaatggtagaataggaaatatcttcctatagaaactagacagaatgattctcataaactcctttgtgatgtgtgcgttcaactcacagagtttaacctttcttttcatagtgcagttaggaaacactctgtttctaaactctgcaagtggatattcagacatccttgaggccttcgttggaaacgggatttcttcatattctgctagacagaagaattctcagtaacttccttgtgttgtgtgtattcaactcacagagttgaacgatcctttacacagagcacacttgaaacactccttttgtggaatttgcaagtggagatttcagccgctttgaggtcaatagtagaaaaggaaatatcttcgtagaaaaactagacagaatgattctcagaaacttctttgtgatgtgtgcgttcaactcacagagtttatcctttcttttcatagagcagttaggaaacactctgtttgtaaactctgcaagtggatattcagacctctttgaggccttcgttggaaacgggatttctccatactgtgctagacagaagaattctcagtaacttcccttgtgttgtgtgtattcaagtgacagagttgaactttcatttagagagagcagatttgaaacactgtttttgtggaatttgcacgtggagatttcaagcgctttggggccaaaggcagaaaaagatatatcttcgtataaaaactagacagaatcattctcagaaactgctctgcgatgtgtgcgttcaactctcaggagtttaacttttcttttcattcagcagtttggaaacactctgtttgtaaagtctgcacgtggatattttgaccacttagaggccttcgttggaaatgggtttttttcctgtaaggctagacagaagaattcccagtaacttccttgtgttgtgtacattcaactcacagagttgaacgttcccttagacagagcagatttgaaacactctttttgtgcaattggcaaatggagatttcaagcgctttaagttcaatggcagaaaaggaaatatcttcgtttcaaaactagacagaatcattcccacaaactgcgttgtgatgtgttcgttcaactcacagagtttaacctttctgttcatagagcagttaggaaacactctgtttgtaaagtctgtaagtggatattcggacatcttgtggccttcgttggaaacgggatttcttcatattctgctacacagaagaattctcagaatcttccttgtgttgtgtgtattcaactcacagagttgaacgatactttacacagagcagacttgaaacactctttttgtggaatttgcaagtggagatttcagccgctttgaggtccatggtagaaaaggaaatatcttcgtataaaaactagacagaatgattctcagaaactcctttgtgatgtgtgcgttcaactcacagagtttaacctttcttttcatagagcagttaggaaacactctgtttgtaaagtctgcaagtggatattcggacctctttgaggccttcgttggaaacgggtttttttcatataaggctagatagaagaattctcagtaacttccctgtgttgtgtgtattcaactcacagagttgaacgatcctttacacagagcagacttgtaacactctttttgtggaatttgcaagtggagatttcagccgctttgaagtcaaaggtagaaaaggaaatatcttcctataaaaactagacagaatcattctcagaaactgctgcgtgatgtgtgcgttcaactctcagagtttaacttttcttttcattcagcggtttggaaacactctgtttgtaaagtctgcacgtagatattttgaccacttagaggccttcgttggaaacgggtttttttcatgtaaggctagacagaagaattcccaggaacttccttgtgttgtgtacattcaactcacagagttgaacgttcccttagacagagcagatttgaaacactgtttttgtgcaattggcaagtggtgatttcagccgctttgaggtcaatggtagaaaaggaaatatcttcgtataaaaactagacagaatgattctcagaaactcctttgtgatgtgtgcgttcaactcacagagtttaacctttcttttcatagagcagttaggaaacactctgtttgtaaattctgcaagtggatattcagacctccttgaggccttcgttggaaacgggatttcttcatattctgctatacagaagaattctcagaaacttccttgtgttttgtgtattcaactcacagatttgaacgatcctttacacagagcagacttgaaacactctttttctggaatttgcaagtggagatttcagccgctttgaggtcaatggtagaaaaggaaatatcttcgtataaaaactagacagaatgattctcagaaactcctttgtgatgtgtgtgtccaactcacagagtttaacctttcttttcatagagcagttaggaaacactctgtttgtaaagtctgcaagaggatattcagacctctttgaggccttctttggaaacgggattttttcatataaggctagacagaagaattcccagtaacttccttgtgttgtgtgtgttcaactctgtgagttgaactttcatttacacagagcagattggaaacactctttttgtggaatttgcaagtggagatttcaagcgctttgaggccaaaggcagaaaaggaaatatcttcgtataaaaactagacagaattattctcagaaactgctgcgtgatgtgtgcgttcaactctcagagtttaacttttcttttcattcagcggtttggaaacactctgtttgtaaagtctgcacgtggatattttgaccacttagaggccttcgttggaaacgggttttttttcatgtaaggctagacagaagaattctcaataacttccttgtgttgtgtgtattcaactgacagagttgaaccttccttcagacagagcagatttgcaacagtctttttgtgtaatttgcaagtggagatttcaagcgctttgaggccaaaggcagaaaaggaaatatcttcgtataaaaactagacagaatgattctcagaaactcctttgtgatgtgtatgttcaacttacagagtttaacttttctattcatagagtagttaggaaacactctgtttgtaaagtctgcaagtggatattttgacctctttgaggccttcgttggaaacgggtttttttcatgtaaggctagacagaagaattctcagtaacttccgcgtgttgtgtgtattcaactcacagagttgaacgatcctttacacagagcagacttgtaacactctttttgtggaatttgtaagtggagatttcagccgctttgaagtcaaaggtagaaaaggaaatatcttcctataaaaactagacagaatgattctcagaaactcctttgtgatgggtgcgttcaactcacagagtttaacctttcttttcatagagcagttaggaaacactctgtttgtaaagtctgcaagtggatattcagacctctttgagaccttcgttggaaacgggtttttttcatataaggctagacagaagaattctcagtaacttccttgtgttgtgtgtgttcaactcacagagttgaactttcatttacacagagcagatttgaaacactctttttgtggaatttgcaaatggagatttcaagcgctttgaggccaaaggcagaaaaggaaatatcttcgtataaaaactagacagaatcattctcagaaactgctctgtgatgtgtgcgttcaactctcagagtttaacttttgttttcattcagcagtttggaaacactctgtttgtaaagtctgcacgtggatattttgaccacttagaggcattcgttggaaacgggtttttttcatgtaaggctagacagaagaattcccagtaacttccttgtgttgggtgcattcaactcacagagttgaacgttcccttagacagagcagatttgaaacactctatttgtgcaatttgcaagtgtagatttcaagcgctttaaggtcaatggaagaaaaggaaatatcttcgtttcaaaactagacagaatcattcccacaaactgcgttgtgatgtgttcgttcaactcacagagtttaacctttctgttcatagagcagttaggaaacactctgtttgtaaagtctgtaagtggatattctgacatcttgtggccatcgttggaaacgggatttcttcatattctgctagacagaagaattctcagaaacttccttgtgttgtgtgtattcaactcacagagttgaacgatcgtttacacagagcagacttgagacactctttttgtggaatttgtaagtggagatttcagccgctttgaggtcaatggtagaaaaggaaatatcttcgtataaaaactagacagaacgattctcagaaactcctttgtgatgtgtgcgttcaactcacagagtttaacctttcttttcatagagcagttaggaaacactctgtttataaagtctgcaagtggatattcagacccctttgaggccttcgttggaaacgggatttcttcatattatgctagacagaagatttcccagtaacttccttgtgttgtgtgtgttcaactcacagagttgaactttcatttacacagagcagatttggaacactctttttgtggaatttgcaaatggagatttgaagcgctttgaggccaaaggcagaaaaggaaatatcttcgtataaaaactagacagaatcattctccgaagctgctgactgatgtgtgcgttcaactctcagagtttaacttttcttttcattcagcggtttggaaacactctgtttgtgaagtctgcacgtggatattttgaccacttagaggccttcgttggaaacgggttttttgcatgtaaggctagacagaagaattctcagtaacttccttgtgttgtgtgcattcaactcacagagttgaacgttcccttagacacagcagatttgaaacactctatttgtgcaatttgcaagtgtagatttcaagcgctttaaggtcaatggcagaaaaggaaatatcttcgtttcaaagctagacagaatcattcccacaaactgcgttgtgatgtgttcgtacaactcacagagtttaacctttctgttcatagagcagttaggaaacactctgtttgtaaagtctgtaagtggatattctgacatcttgtggccttcgttggaaacgggatttcttcatattctgctagacagaagaattctcagtaacttccttgtgttgtgtttattcaactcacagagttgaatgatcctttacacagagcagacttgaaacactctttttgtggaatttgcaagtggagatttcagccgctttgaggtcaatggtaggaaaggaaatatcttcgtataaagactagacagaatgattctcagaaactcctttgtgatgtgtgcgttcaactcacacagtttaacctttcttatcatagagcagttaggaaacactctgtttgtaaagtctgcaagtggatattccgacctccttgaggccttcgttggaaacgggatttcttcatattatgctagacagaagaattctcagtaacttccttgtgttgtgtgtattcaactcacagagttgaacgatcctttacacagagcagatttgaaacactctttttgtggaatttgcaagtggagatttcagccgctttgaggtcaatggtagaaaaggaaatatcttcgtataaagactagacagagtgattctcagaaactcctttgtgatgtctgcgttcaactcacagagtttaacctttcttttaatagagcagttaggaaacactctgtttgtaaagtctgcaagtggatattcagacctccttgaggccttcgttggaaacgggatttctacatattatgctagacagaagaattctcagtaacttccttgtgttgtgtgtattcaactcacagagttgaacgatccttcacacagagcagacttgaaacactctttttgtggaatttgcaagtggagatttcagccgctttgaggtcaatggtagaaaaggaaatatcttcgtataaagactagacagaatgattctcagaaactccttagtgatgtgtgcgttcaactcacagagtttaacctttctgttcatagagcagttaggaaacactctgtttgtaaagtatgcaagtggatatacagacctccttgaggccttcgttggaaacgggatttcttcatattctgctagacagaagaattctcagtaacttccttgtgttgtgtgtattcaactcacagagttgaacggttctttacacagagcagatttgagacactctttttgtggaatttgtaagtggagatttcagccgctttgaggtcagtggtagaaaaggaaatatcttcgtataaaaactagacagaatgattctcagaaactctttgtgatgtgtgtgttcaactcacagagtttaacctttcttttcatagagcagttaggaaacgctctgtttgtaaagtctgcaagtggatattcagacctcgttgagaccttcgttggaaacgggatttcttcatattctgctagacagaagaattctcagtaacttctttgtgttgtgtgtattcaactcacagaggtgaacgatcctttacacagagcagacttgaaacactctttttgtggaatttcaagtggagatttcagccgctttgaggtcaatggtagaataggaaatatcttcctatagaaactagacagaatgattctcagaaactcctttgtgatgtgtgcgttcaactcacagagtttaacctttctctccattgagcagttaggaaacactctgtttgtaaagtctgcaagtggatattcagacctcctagaggccttctttggaaacaggctttcttcatattatgctagacagaagaattctcagaaacttctttgtgttgtgtgtattcaactcacagagttgaacgatcctttacacagagcagacttgaaacactctttttgtggaatttgcaagtggagatttcagccgctttgaggtcaatggtagaataggaaatatcttcctatagaaactagacagaatgattctcagaaactcctttgtgatgtgtgcgatcaactcacagagtttaacttttcttttcatagagcagttaggaaacactctgtttgtaaagtctgcaagtggatattcagacctctttgaggccttcgttggaaacgggatttcttcatattatgctagacagaagaattctcagtaacttccttgtgttgtgtgtattcaactgacagagttgaactttcatttacacagagcagatttgaaacactctttttgtggaatttgcaaatggagatttcaagcgctttgaggccaaaggcagaaaaggaaatatcttcgtataaaaactagacagaatcattctcagaaactgctgcatgatgtgtgcgttcaactctcagagtttaacttttcttttcattcagcggtttggaaacactctgtttgtaaagtctgcacgtggaaattttgaccacttagaggccttcgttggaaacgggtttttttcatgtaaggctagacagaagaattcccagtaacttccttgtgttgtgtgcattcaactcacagagttgaacgttcccttagacagagcagatttgaaacactctatttgtgcaatttgcaagtgtagttttcaagctctttaaggtcaacggcagaaaaggaaatatcttggtttcaaaactagacagaatcattcccacaaactgcgttgtgatgtgttcgttcaactcacagtgtttaacctttctgttcatagagcagttaggaaacactctgtttgtaaagtctgcaagtggatattcagacctccttgaggccttcgttggaaacgggatttcttcatattctgctagacagaagaattctaagtaacttccttgtgttgtgtgtattcaactcacagagttgaacgatcctttacacagagcagacttgaaacactctttttgtggaatttgcaagtggagatttcagccgctttgaggtcaatggtagaaaaggaaactatcttcatataaagactagacagaatgattctcataaactcctttgtgatgtgtgcgttcaactctcaaagtttaacttttcttttcatagagcagttaggaaacactctgtttgtaaagtctgcaagtggatattcagacctctttgaggccttctttggaaacgggatttcttcatattatgctagacagaagaattctcagtaacttccctgtgttgtgtgtattcaactgacagagtcgaactttcatttagagagagcagatttgaaacactgtttttgtggaatttgcaagtggagatttcaagcgctttggggccaaaggcagaaaaggaaatatcttcgtataaaaactagacagaatcattctcagaaactgctctgcgatgtgtgcgttcaactctcagagtttaacttttcttttcattcagaagtttggaaacactctgtttgtaaagtctgcacgtggataacttgaacacttagaggccttcgttggaaacgggtttttttcatgtaaggctagacagaagaattctcagtaacttccttgtattgtgtgtattcaactcacagagttgaacgatcctttgcacagagcacacttgtaacactctttttgtggaatttgcaagtggagatttcagccgctttgaagtcaaaggtagaaaaggaaataacttcctataaaaactagacagaatgattctcataaactcctttgtgatgtgtgcgttgaactcacagagtttaacctttcttttcatagagcagttaggaaacactctgtttgtaaagtctgtaagtggatattctgacatcttgtggccttctttggaaacgggatttcttcatattgtgctagacggaagaattctccgtaacttccttgtgttgtgtgtattcaactcacagagttgaacgatcctttacacagagcagacttgtaacactctttttgtggaatttgcaagtggagatttcagccgctttgaagtcaaaggtagaaaaggaaatatcttcctataaaaattagacagaatgattctcagaaactcctttgtgatgtgtgcgttcaactcacacagtttaacttttcttttcatacagcagttaggaaacactctgtttgtaaagtctgcaagtggatattcagacctccttgaggccttctttggaaacgggatttcttcatattatgctagacagaagaatccccagtaacttccttgtgttgtgtgtgttcaactcacagagttgaactttgatttacacagagcagatttgaaacactctttttgtggaatttgcaagtggagatttcaagcgctttggggccaaaggcagaaaaggaaatatcttcgtataaaaactagacagaatcattctcagaaactgctctgcgatgtgtgcgttcaattctgagtttaacttttcttttcattcagcagtttggaaacactctgtttgtaaagtctgcacgtggatattttgaccacttagaggccttcgttggaaacgggtttttttcctgtaaggctatacagaagaattcccagtaacttccttgtgttgtgtacattcaactcacagagttgaacgatcccttagacagagcagatttgaaacactctttttgtgcaattggcaagtggagacttcaagcgctttaaggtcaatggcagaaaaggaaatatcttcgtttcaaaactagacagaatcattcccacaaactgcgttgtgatgtgttcgttcaactcacagagtttaacctttctgttcgtagagcagttaggaaacactctgtttgtaaagtctgtaagtggatattctgacatcttgtggccttcgttggaaacgggatttcttcatattctgctagacagaagaattctcagtaacttccttgtgttgtgtgtattcaactcacagagttgaacgatcctttacagagagcagacttgaaacactctttttgtggaatttgcaagtggagatttcagccgctttgaggtctatggtagaaaaggaaatgtcttcgtataaagactagacagaacgattctcagaaactcctttgtgatgtgtgtgttcaactcacagagtttaacctttcttttcatagagcagttagtaaacactctgtttataaagtctgcaagtggatattcagacccctttgtggccttctttggaaacgggatttcttcatattatgctagacagaagaattctcagtaacttccttgtgttgtgtgtattcaactcacagtagttgaacgaccctttacacagagtagacttgaaacactctttttgttgaatttgcaagtggagatttcagccgctttgaggtcaatggtagaataggaaatatcttcctatagaaactagacagaatgattctcagaaactcctttgtgatgtgtgagttcaactcacagagtttaacctttcttttcatagagtagttaggaaacactctgtttgtaaagtctgcaagtggatattcagacctctttgaggccttcgttggaaacgggattttttcatataaggctagagagaagaattcccagtaacttccttgtgttgtgtgtgttcaactcacagagttgaactttcatttagtcagagcagatttgaaacactctttttgtggaatttgcaaatggagatttcaagcgctttgaggccaaaggcagaaaaggaaatatcttcgtataaaaactagacagaataattctcagaaactgttctgcgatgtgtgcgttcaactctcagagtttaacttttcttttcattcagcagtttggaaacactctgtaaactctgcatgtggatattttgaccacttagaggccttcgtcggaaacgggtttttttcctgtaaggctagacagaagaattcccagtaacttccttgtgttgtgtacattcaactcacagagttgaacgttcccttagacagagcagatttgaaacaatctttttgtgcaattggcaagtggtgatttcagccgctttgaggtcaatggtagaaaaggaaatatcttcgtataaaaactagacagaatcattcccacaaaactgcgttgtgatgtgttcgttcaattcacagagtttaacctttctgttcatagagcagttaggaaacactctgtttgtaaagtctgtaagtggatattctgacatcttgtggccttcgttggaaacgggatttcttcgtattctgctagacagaaagaattctcagtaacttccttgtgttgtgtgtattcaactcacagagttgaacgatcctttacacagagcagacttgaatcactctttttgtggaatttgcaagtggagatttcagccgctttgaggtcaatagtagaaaaggaaatatcttcgtagaaaaactagacagatgattctcagaaactcctttgtgatgtgtgcgttcaactcacagagtttaaactttcttttcatagagcagttaggaaacactctgtttgtaaagtctgcaagtggatattcagacctctttgaggccttcgttggaaacgggatttcttcatattctgctagacagaagaattcccagtaacttccttgtgttgtgtgtgttcaactcacagagttgaactttcatttacaaagagcagatttgaaacactctttttgtggaatttgcaagtggagatttcaagcgctttgaggccaaaggcagaaaaggaaatatcttcgtataaaaactagacagaatcattctcagaaactgctgcgtgatgtgtgcgttcaactctcaggagtttagcttttcttttcattcagcggtttggaaacactctgtttgtaacgtctgcacgtggatattttgaccacttagaggccttcgttggaaacgggttttttgcatgtaaggctagacagaagaattcccagtaacttccttgtgttgtgtgcattcaactcacagagttgaacgttcccttagacagagcagatttgaaacactctatttgtgcaatttgcaagtgtagatttcaagcgctttaaggtcaatggcagaaaaggaaatttcttcgttgcaaaactagacagaatcattcccacaaactgcgttgtgatgtgttcgttcatctcacagagtttaacctttcttttcgtagagcagttaggaaacagtctgtttgtaaattctgtaagtggatattctgacatacttgtggccttcgttggaaacgggatttcttcatattctgctagacagaagaattctcagaatcttccttgtgttgtgtgtattcaactcacagagttgaacgatcctttacacagagcagacttgaaacactctttttgtggaatttgcaagtggagatttcagccgctttgaggtccatggtagaaaaggaaatctcttcgtataaaaactagacagaatgattctcagaaaatcctgtgtgatgtgtgcgttcatctcacagagtttaacctttcttttcatagagcagttaggaaacactctgtttgtaaagtctgcaagtggatattcagacctccttgaggccttccttggaaacgggatttcttcatattctgctagacagaagaattctcagtaacttccttgtgttgtgtgtattcaactgacagagttggactatcattttgagagagcagatttgaaacactgtttttgtggaatttgcaagtggagatttcaagcgctttggggccaaaggcagaaaaggaaatatcttcgtataaaaactagacagaatcattctcagaaactgctctgcgatgtgtgcgttcaactctcagagtttaacttttcttttcattcagcagtttgaaaacactctgtttgtaaagtctgcacgtggataatttgaccacatagaggccttcgttggaaacgggtttttttcatgtaaggctagacagaagaattcccagtaacttccttgtgttgtgtgcattcaactcacagagttgaacgttcccttagacagagcagatttgaaacactctatttgcgcaacttgcaagtgtagatttcaagcgctttaaggtcaatggcagaaaaggaaatatcttcgtttcaaaactagacagaatcattccctcaaactgcgttgtgatgtgttcgttcaactcacagagtttaacctttcttttcatagagcagttaggaaacagtctgtttgtaaattctgtaagtggatattctgacatcttgtggccttcgttggaaacgggatttcttcatattctgctagacagaagaattctcagaatcttccttgtgttgtgtgtattcaactcacagagttgaacgatcctttacacagagcagacatgaaacactctttttgtggaatttgcaagtggagatttcagccgctttgaggtccatggtagaaaaggaaatatcttcgaataaaaactagacagaatgattctcagaaactcctttgtgatgtgggcgttcaactcacagagtttaaccttccttttcatagagcagttaggaaacactctgtttgtaaagtctgcacgtggatatttggacttctttgaggccttcgttggaaacgggtttttttcatgtaaggctagacggaagaattctcagtaacttccttgtgttgtgtgtattcaactgacagagttgaactttcatttggagagagcagatttgaaacactatttttgtggtatttgcaagtggagatttcaagcgctttggggccaaaggcagaaaaggaaatatcctcgtataaaaacaagacagaatcattctcagaaactgctctgcgatgtgtgcgttcaactctcagagtttaacttttcttttcattcagcagtttggaaacactctgtttgtaaagtctgcacgtggataatttggccacttagaggccttcgttggaaacgggttttttcatgtaaggctagacagaagaattcccagtaacttccttgcgttgtgtacattcaactcacagagttgaacgttcccttagacagagcagatttgaaacactctttttgtgcaattggcaagtggagatttcaagcgctttaaggtcaatggcagaaaaggaaatatcttcgtttcaaaactagacagaatcattcccacaaactgcgttgtgatgtgttcgttcaaatcacagagtttaacctttcttttcatagagcagttaggaaacagtctgtttgtaaattctgtaagtggatattctgacatcttgtggccttcgttggaaacgggatttcttcatattctgctagacagaagaattctcagtaacttccttgtgttgtgtgtattcaactcacagagttgaacgatcctttacagagagcaggcttgaaacactctttttgtggaatttgcaagtggagatttcagccgctttgaggtcaatggtagaatgggaaatatcttcctatagaaactagacagaatgattctcagaaactcctttgtgatgtgtgtgttcaactcacagagtttaaccttttttttcatagagcagttaggaaacactctgtttgtaaagtctgcaagaggatattcagacctctttgaggccttcgttggaaacgggtttttttcatataaggctagacagaagaattcacagtaacttccttgtgttgtgtgtattcaactgacagagttgaactttcatttagagagagcagatttgaaacactgtttttgtggaatttgcaagtggagatttcaagcgctttggggccaaaggcagaaaaggaaatatcttcgtataaaaactagacagaatcattctcagaaactgctgcgtgatgtgtgcgttcaactctcagagtttaacttttcttttcattcagcggtttggaaacactctgtttgtaaagtctgcacgtggatattttgaccacttagaggccttcgttggaaacgggttttttttcatgtaaggctagacagaagaattcccagtaacttcccttgtgttgtgtacattcaactcacagagttgaacgttccgttagacagagcagatttgaaacactctttttgtgcaattggcaaatggagatttcaagcgctttaaggtcaatggcagaaaaggaaatatcttcgtttcaaaactagacagaaatcattcccacaaactgcgttgtgatgtgttcgttcaactcacagcagtttaacctttcttttcatagagcagttaggaaacagtctgtttgtcaattctgtaagtggatattctgacatcttgtggccttcgttggaaacgggatttcttcatattctgctagacagaagaattctcagtaacttccttgtgttgtgtgtattcaactcacagagttgaacgatcctttacacagagcagacttgaaacactctttttgtggaatttgcaagagtagatttcaagcgctttaaggtcaatggcagaaaaggaaatatcttcgtttcaaaactagacagaatgattctcagaaactcctttgtgatgtgtgcgttcaacacacagagtttaacttttcttttcatagagcagttaggaaacactctgtttgtaaagtctgcaagtggatattcagacctctttgaggccttcgttggaaacgggatttcttcatattctgctagacagaagaattctcagtaacttccttgtgttgtgtgtattcaactcacagagttgaacgatcctttacacagagcagacttgaaacactctttttgtggaatttgcaagtggatatttcagccgctttgaggtcaatagtagaaaaggaaatatcttcgtagaaaaactagacagaatcattctcagaaactgctgcgtgatgtgtgcgttcaactctcagagtttaacttttcttttcattcagcggtttggaaacactctgcttgtaaagtctgcacgtggatattttgaccacttagaggccttcgttggaaacgggtttttttcatgtaaggctagacagaagaattcccagtaacttccttgtgttgtgtgcattcaactcacagagttgaacgttcccttagacagagcagatttgaaacactctatttgtccaatttgcaagtgtagatttcaagcgctttaaggtcaacggcagaaaaggaaatatcttcgtttcaaaactagacagaatgattctcagaaaatcttttgtgatgtgtgcgttcaactcacagagattaacttttcttctcatagagcagttaggaaacactctgtttgtaaagtttgcaagtggatattcagacctctttgaggccttcgttggaaacgggatttcttcatattatgctagacagaagaattctcagtaacttccttgtgttgtgtgtattcaactcacagagttgaacgatcctttacagagagcagacttgaaacacactttttgtggaatttgcaagtggagttttcagccgctttgaggtcaattgtagaaaaggaaatatcttcgtataaagactagacagaatgattctcataagctcctttgtgatgtgtgcgttcaactcacagagtttaacctttcttttcatagagcagttaggaaacactctgtttgtaaagtctgcaagtggatattcagacctccttgaggccttcgttggaaacgggatttcttcatattctgctagacagaagaattctcagaaacttccttgtgttgtgtgttttcaactcacagagttgaacgatgctttacacagagtagacttgaaacactctttttgtgaaatttgcaagtagagatttcagccgctttgaggtcaacggtagaaaaggaaatatcttcctataaaaactagacagaatgattctcagaaactcctttgtgatgtgtgtgttcaactcacagagtttaacgtttcttttcatagagcagttagtaaacactctgtttataaagtctgcaagtggatattcagacccctttgaggccttcgttggaaacgggatttcttcatattatgctagacagaagaattctcagtaacttccttgtgttgtgtgtattcaactcacagagttgaactttcatttacacagagcagatttgaaacactctttttgtggaatttgcaaatggagatttcaagcgctttgaggccaaaggcagaaaaggaaatatcttcgtttcaaaactagacagaatcattctcagaaactgctgcgtgatgtgtgcgttcaactctgagagtttaacttttcttttcattcagcggtttggaaacactctgtttgtaaagtctgcacgtggatattcagacctctttgaggccttcgttggaaacgggtttttttcatgtaaggctagacagaagaattcccagtaacttccttgtgttgtgtacattcaactcacagagttgaacgttcccttatacagagcagatttgaaacactctttttgtgcaattggcaagtggagatttcaagcgctttaaggtcaatggcagaaaaggaaatatcttcgtttcaaaactagacagaatcattcccacaaagtgcgttgtgatgtgttcgttcaactcacagagtttaacctttctgttcatagagcagttaggaaacactctgtttgtaaagtctgtaagtggatattctgacatcttgtggccttcgttggaaacgggatttcttcatattctgctagacagaagaattctcagtaacttccttgtggtgtgtgtattcaactcacagagttgaacgatcctttacacagagcagacttgagacactcattttgtggaatttgcaagtggagatttcagccgctttgaggtcaatggtagaaaaggaaactatcttcatataaagactagacagaatgattctcacaaactcctttgtgatgtgggcgttgaactcacagagtttaacctttcttttcatagagcagttaggaaacactctgttggtaaagtctgaacgtggatatttggacttctttgtggtcttcgttggaaacgggtttttttcatgtaaggctagacagaagaattctcagtaacttccttgtgttgtgtgtattaaactgacagagttgaactttcatttagagagagcagatttgtaacactgtttttgtggaatttgcaagtggagatttcaagcgctttggggccaaaggcagaaaaggaattatcttggtataaaaactagacagaatcattctcagtaactgctctgtgatgtgtgcgttcaactctcagagtttaacttttcttttcattcagcagtttggaaacactctgtttgtaaagtctgcacgtggatattttgaccacttagaggccttctttggaaacggttttttctcatgtaaggctagacagaagaattcccaggaacttacttgtgttgtgtacattcaactcacagagttgaacgttcccttagacagagcagatttgaaacactctttttgtgcaattggcaaatggagatttcaagcgctttaaggtcaatggcagaaaaggaaatatcttcgtttcaaaactagacagaatcattcccacaaactgcgttgtgatgtgtgcgttcaactcacagagtttaacctttctgttcatagagcagttaggaaacactctgtttgtaaagtctgtaagtggatattctgacatcttgtggccttcgttggaaacgggatttcttcatattctgctagacagaataattctcagtaacttccttgtgttgtgtgtattcaactcaaagagttgaaggatcctttacagagagcaggcttgaaacactctttttgtcgaatttgcaagtggagatttcagctgctttgaggtcaatggtagaataggaaatatcttcttatagaaactagacagaatgattctcagaaactcctttgtgatgtgtgcgttcaactcacagagttcaacctttcttttcatagagcagttaggaaacactctgtttgtaaagtctgcaagtggatattcagacctccttgaggccttcgttggaaacgtgatttcttcatattatgctagacagaagaattctcagtaacttcccttgtgttgcgtgtattcaactcacagagttgaacgatcctttacaaagagcagacttgaaacactctttttggggaatttgcaagtggagatttcagccgctttgaggtcaatggtagaatagggaatatcttcctatagaaactagacagaatgattctcagaaactcctttgtgatgtgtgcgttcaactctcagagtttaacttttcttttcattcagcagtttggaaacactctgtttgtaaagtctgcacgtggataatttgaccacttagaggctttcgttggaaacgggtttttttcctgtaaggctagacaaaagatttcccagtaacttccttgtgttgtgtgcattcaactcacagagttgaacgttccgttagacagagcagatttgaaacactctatttgtgcaatttgcaagtgtagatttcaagcgctttaaggtcaatggcagaaaaggaaatatcttcgtttcaaaaccagacagaatcattcccacaaactgcgttgtgatgtgttcgttcaactcacagagtttaacctttctgttcatagagcagttaggaaacactctgtttgtaaagtctgcaagtggatattcagacctccttgaggccttcgttggaaatgggatttcttaatattctgctagacagaagaattctcagaatcttccttgtgttgtgtgtattcaactcacagagttgaacgatcctttacacagagcagacttgaaacactctttttgtggaatttgcaagtggagatttcagcctctttgaggtccatggtagaaaaggaaatatcttcgtataaaaactagacagaatgattctcagaaaatcttttgtgatgtgtgcgttgaactcacagagtttaacttttcttctcatagagcagttaggaaacactctgtttgtacagtctgcaagtggatattcagacctctttgaggccttcgttggaaacgggatttcttcatattatgctagacagaagaattcccagtaacttcccttgtgttgtgtgtgttcaactcacagagttgaactttcatttacccagagcagatttgaaacactctttttgtggaatttgcaagtggagatttcaagcgctttgaggccaaagacagaaaaggaaatatcttcgtttcaaaactagacagaatcattctcagaaactgctgcgtgatgtgtgcgttcaactctcagagtttaacttttcttttcattcagcagtttggaaacactctgtttgtaaagtctgcacgtggaaattttgaccacttagaggccttctttggaaacgggattttttcatgtaaggctagacagaagaattcccagtaacttccttgtgttgtgtgcattcaactcacagagttgaacgttcccttagacagagcagatttgaaacactctatttgtgcaatttgcaagtgtagttttcaagctctttaaggtcaacggcagaaaaggaaatatcttcgtttcaaaactagacagaatcattcccacaaactgcgttgtgatgtgttcgtccaactcacagagtttaacctttctgttcatagagcagttaggaaacactttgtttgtaaagtctgtaagtggatattctgacatcttgtggccttcgttggaaacgggatttcttcatattctgctagacagaagaattctcagtaacttccttttgctgtgtgtattcaactcacatagttgaatgatcctttacacagagcagattagaaacacactttttgtggattttgcaagtggagatttcagccgctttgaggtcaatggtagaaaaggatatatcttcgtatagaaactagacagaatgattctcagaaactactttgtgatgtgtgcgttcaactcacagagtttaacctttcttttcctagagtagttaggaaacactctgtttttaaagtctgcaagtggatattcagacctctttgaggccttcgttggaaacgggatttcttcatattatgctagacagaagaattcccagtaacttccttgtgttgtgtgtgttcaactcacagagttgaactttcatttacacagagcagatttgaaacactctttttgtggaatttgcaagtggagatttcaagcgctttgaggccaaaggcagaaaaggaaatatcttcgttcaaaactagacagaatcattctcagaaactgctctgcgatgtgtgcgttcaactctcagagtttaacttttcttttcatgcagcagtttggaaacactctgtttgtaaagtctgcacgtggataacttgaccacttagaggacttcgttggaaacgggtttttttcctgtaaggctagacagaagaattcccagtaacttccttgtgttgtgtacattcaaatcacagagttgaacgttcccttagacagagcagacttgtaacactctttttgtggaatttgcaagtggagatttcagccgctttgaagtcaaaggtagaaaaggaaatatcttcctataaaaactagacagaatgattctcagaaactcctttgtgatgtgtgtgttcaactcacagagtttaacatttcttttcatagagcagttaggaaacactctgtttgtaaagtctgcaagtggatattcagacctagttgaggccttcgttggaaacgggatttcttcatattctgctagacagaagaattctgagtaacttccttgtgttgtgtttattcaactcacagagttgaatgatcctttacacagagcagacttgaaacactctttttgtggaatttgcatgtggagatttcagccgctttgtggtcaatggtagaaaaggaaatatcttcgtataaagactagacagaatgattctcagaaactcctttgtgatatgtgcgttcaactcacagagtttaacctttcttttcatagagcagttaggaaacactctgcttgtaaagtctgcaagtggatattcagccctctttgaggccttcgttggaaatgggtttttttcatataaggctagacagaggaattcccagtaacttccttgtgttgtgtgtgttcaactcacagagttgaactttcatttacacagagcagatttgaaacactctttttgtggaatttgcaagtggagatttcaagcgctttgaggccaaaggaagaaaaggaaatatcttcgtttcaaaactagacagaatcattctcagaaactgctgcgtgatgtgtgcgttcaactctcagagtttaacttttcttttcattcagcggtttggaaacactctgtttgtaaagtctgcacgtggatattttgaccacttagaggccttcgttggaaacgggttttttttcatgtaaggctagacagaagaattcccagtaacttccttgtgttgtgtgcattcagctcagagagttgaaccttcccttagacagagcagatttgaaacactctatttgtgcaatttgcaagtgtagatttcaagcgcttcaaggtcaatggcagaaaaggaaatatcttcgtttcaaaactagacagaatcattcccacaaactgcgttatgatgtgttcgttcaactcacagagtttaacctttcttttcatagagcagttaggaaacagtctgtttgtaaattctgtaagtggatattctgacatcttgtggccttcgttggaaacgggatttcttcatattctgctagacagaagaattctcagtaactaccttgtgttgtgtgtattcaactcacagagttgaacgatcctttacacagagcggacttgaaacactcgttttgtggaatttgcaagtggagatttcagccgcgttgaggtcaatggtagaaaaggaaatatctacgtataaaaactagacagaatgattctcagaaactcctttgtgatgtgtgcgttcaactcacagagtataacctttcttttcatagagcagttaggaaacactctgtttgtaaagtctgcaagtggatattcagacctctttgaggccttcgttggaaacgggtttttttcatataaggctagacagaagaattcccagtaacttcccttgtgttgtgtgtgttcaactcacagagttgaactttcatttacacagagcagatttgaaacactctttttgtggaatttgcaggtggagatttcaagcgctttgaggccaaaggcagaaaaggaaatatcttcgtataaaacctagacagaatcattctcagaaactgctgcgtggtgtgtgcgttcaactctcagagtttaacttttcttttcattcagcggtttggaaacactctgtttgtaaagtctacacgtggatattttgaccacttagaggccttcgttggaaactggttttcttcatgtaaggctagacagaagaattcccaggaacttccttgtgttgtgtacattcaactcacagagttgaacgttcccttagacagagcagatttgaagcactctttttgtgcaattggcaagtggtgatttcagccgctttgaggtcaatggtagaaaaggaaatatcttcgtataaaaactagacagaatgattctcagaaactcctttgtgatgtgtgcgttcaactcacagagtttaacctttcttttcatagagcagttaggaaacactgtttgtaaagtctgcaagtggatattcagacatccttgaggccttcattggaaacgggatttcttcatattatgctagacagaagaattctcagtaacttccttgtgttgtgtgtattcaactcacagagttgaacgatcctttacacagagcagacttgaaacactctttttgtggaatttgcaagtggagatttcagccgctttgaggtcaatggtagaataggaaatatcttcctatagaaactggacagaacgattctcagaaactcctttgtgatgtgtgcgtacaactcacagagtttaacctttcttttcatagagcagttaggaaacactctgtttgtaaagtctgcaagtggatattcagacctctttgaggccttcgttggaaacgggatttcttcatattcctgctagacagaagaattcccagtaacttccttgtgttgtgtgtgttcaactcacagtgttgaactttcatttacacagagcagattggaaacactctttttctggaatttgcaagtggagatttcaagcgctttgaggccaaaggcagaaaaggaaatatcttcgtataaaaactagacagaatcattctcagaaactgctgcgtgatgtgtgcgttcaactctcagagtttaacttttcttttcattcagcgctttggaaacactctgtttgtaaagtctgcacgtggaaattttgaccacttagaggccttcggttggaaacgggtttttttcatgtaaggctagacagaagaattctcagtaacttccttgtgttgtgtgtattcaactcacagagttgaacgatcctttacacagagcagattgaaacactctttttgtggaatttgcaagtggagatttcagccgctttgaggtcaatggtagaaaaggaaatatcttcgtataaagactagacagaatgattctcagaaactcctttgtgatgtgtgcgttcaactcacagagtttaacctttctgttcatagagcagttaggaaacactctgtttgtaaagtctgtaagtggatattctgacatcttgtggtcttcgttggaaacgggatttctgcatattctgctagacagaataattctcagtaacttccttgtgttgtgtgtattcaactcacagagttgaacgatcctttacagagagcagacttgaaacactctttttgtggaattcgcaagtggagatttcagccgctttgaggtcaatgttagaaaaggatatatcttcgtataaagactagacagaatgattctcagaaactcctttgtgatgtgtgcgttcaactcacagagtttaacctttcttttcatagagcagttaggaaaccctctgtttataaagtctgcaagtggatattcagacctctttgaggccttcgttggaaacgggatttcttcatattatgctagacagatgaattctcattaacttccttgtgttgtgtgtattcaactcacagagttgaacgatcctttacacagagcggacttgaaacactctttttgtggaatttgcaagtggagatttcagccgcgttgaggtcaatggtagaaaaggaaatctcttcgtataaaaactagacagaatgattctcagaaactcctttgtgatgtgtgtgttcaactcacagagtttaaccttagttttcatagagcagttaggaatcactctgtttgtaaagtctgcaagtggatattcagacctctttgaggccttcgttggaaacgggtttttttcatataaggctagacagaagaattctcagtaacttccttatgttgtgtgtattcaactgacagagttgaactttcgtttagagagagcagatttgaaacactctttttgtggaatttgcaagtggagatttcaagcgctttggggccaaaggcagaaaaggaaatatcttcgtataaaaactagacagaatcattatcagaaactgctgcgtgatgtgtgtgttcaactctcagagtttaacttttcttttcattcagcggtttagaaacactctgtttgtaaagtctgcacgtggatattttgtccacttagaggccttcgttggaaacgggttttttgcatgtaaggctagacagaagaattccccagtaacttccttgtgttgtgtacattcaactcacagagttgaacgttcccttacacagagcagatttgaaacactctttttgtgcaattggcaagtggagatttcaagcgctttaaggtcaatggcagaaaaggaaatatcttcgtttcaaaactagacagaatcattcccagaaactgcgttgtgatgtgttcggtaaactcacagagtttaaccattcttttcatagagcagttaggaaacagtctgtttgtaaattctgtaagtggatattctgacatcttgtggccttcgttggaaacgggatttcttcatattctgctagacagaagaattctcagtaacttccttgtgttgtgtgtattcaactcacagagttgaaccatctttcacacagagcagatctgaaacactctttttgtggaatttgcaagtggagatttcagccaccttgaggtcaatggtagaaaaggaaatatcttcgtataaaaactagacagaatgattctcagaaactcctttgtgatgtgtgcgttcaactcacagagttcaacctttcttttcatagagcagttaggaaacactctgtttgtaaagtctgcaagtggatattcagacctccttgaggccttcgttggaaacgggatttcttcatattatgcaagacagaagaattctcagtaacttccttgtgttgtgtgtattcaactcacagagttgaaagatcctttacagagagcagacttcaaacactctttttgtggaatttgcaagtggagatttcaggcgctttgaggtcaatggtagaaaaggaaactatcttcgtataaagactagacagaatgattctcagaaactcctttgtgatgtgtgcgttcaactcacagagtttaacttttcttttcatagagcagttaggaaacactctgtttgtaaagtctgcaagtggatattcagacatctttgaggctttcgttggaaacgggatttcttcatattctgctaggcagaagaattctcagtaacttccttgtgttgtgtgtattcaactcacagagttgaacgattctttacacagagcagacttgaaacactctttttgtggaatttgcaagtggagatttcagccgctttcatgtcactggtagaaaaggaaatatcttcgtataaagactagacagaatgattctcagaaactcctttgtgatgtgtgcgttcaactcacagagttcaacctttcttttcatagagcagttgggaaacactctgtttgtaaagtctgcaagtggatattcagacttctttgaggccttctttggaagcgggatttcttcatgttctgctagacagaagaattctcagtaacttccttgtgttgtgtgtattcaactcacagagttgaatgatcctttacacagaacagacttgaaacactcttgttgtggaatttgcaagtggagatttcagccgctttgtggtcaacggtagaataggtaatatcttcctatagaaactagacagaatcattctcagaaactgctctgcgatgtgtgcgttcaactctcacagtttaacttttcttttcattcagcagtttggaaacactctgtttgtaaagtctgcacgtggataatttgaccacttagaggccttcgttggaaacgggttattttcatgtaaggctagacagaagaattcccagtaacttccttgtgttgtgtgcattcaactcacagagttgaacgttcccttagacagagcagatttgaaacactctatttgtgcaatttgcaattgtagatttcaagcgctttaaggtcaatggcagaaaaggaaatatcttcgtttcaaaactagacagaatcattcccacaaactgcgttgtgatgtgttcgttcaactcacagagtttaacctttctgttcatagagcagttaggaaacactctatttctaaagtctgtaagtggatattctgacatcttgtggccttcgttggaaactgggatttcttcatattctgctagacagaagaattcccagtaacttccttgtgttgtgtgcattcaactcacagagttgaacgatcctttacacagagcagacttgaaacactctttttgtggaatttgcaagtggacatttcagccgctttgaggtcaatagtagaaaaggaaatatcttcgaagaaaaactagacagaatgattctcagaaactcctttgtgatgtgtgcgttcaactcacactgtttaacctttcttttcatagagcagttaggaaacactctgtttgtaaagtctgcaagtggatattcagacctccttgaggcattcgttggaaacgggatttcttcatattatgctagacagaagaattcccagtaacttccttgtgttgtgtgtgttcaactcacagagttgaactttcatttacacagagcacatttgaaacactctttttgtggaatttgcaaatggagatttcaagcgctttgaggccaaaggcagaaaaggaaatatcttcgtttcaaaactagacagaatcattctcagaaactgctgcgtgatgtgtgcgttcaactctcagagtttaacttttcttttcattcagccgtttggaaacactctgtttataaagtctgcacgtggaaattttgaccacttagaggccttcgttggaaacgggtttttttcatgtaaggctagacagaagaattcccagtaaattccttgtgttgtgtacattcaactcacagagttgaacgttcccttagacagagcagatttgaaacactctttttgtgcaattggcaagtggagatttcaagcgctttaaggtcaatggcagaaaaggaaatatcttcgtttcaaaactagacagaatcattcccacaaactgcgttgtgatgtgttcgttcatctcacagagtttaacctttcttttcatagtgcagttaggaaacactctgtttgtaaattctgtaagtggatattctgacatcttgtggccttcgttggaaacgggatttcttcatattctgctagacagaagaattctcagaatcttccttgtgttgtgtgtcttcaactcacagagttgaacgatggtttacacagagcagatttgaaacactctttttgtggaatttgcaagtggagatttcagccgctttgaggtcaatggtagaaaaggaaatgtcttcgtataaaaactagacagaatgattctcagaaactcctttgtgatgtgtgcgttcaactcacagagtttaacctttcttttcatagagcagttaggaaacactctgtttgtaaagtctgcaagtggatattcagacctctttgaggccttcgttggaaacgggtttttacatataaggcttgacagaacaattcccagtaacttccttgtgttgtgtgtgttcaactcacagagttaaactttcatttacacagagcagatttgaaacactctttttgtggaatttgcaagtggagatttcaagcgctttgaggccaaaggcagaaaaggaaatatcttcgtataaaaactagacaaaatgattctcagaaactcctttgtgatgtgtgcgttcaactcgcatagtttaacctttcttttcatagagcagttaggaaacactcggtttgtaatgtctgcacgtggatatttggacttctttgaggccttctttggaaacgggttttttccatgtaaggctagacagaagaattcccagtaacttcattgtgttgtgtgcattcaactcacagagttgaacgttcccttagagcagatttgaaacactctatttgtgcaatttgcaagtgtagatttcaagcgctttaaggtcaatggcagaaaaggaaatatcttcgtttcaaaactagacagaatcattcccacaaactgcgttgtgatgcgttcgttcaactcacagagtttaacctttctgttcatagagcagttaggaaacactctgtttgtaaattctgcaagtggatattcagacctccttgaggccttcgttggaaacgggatttcttcatattctgctagacagaagaattctcagtaacttcccttgtgttgtgtgtattcaactcacagagttgaacgatcctttacacagagcagacttgaaacactctttttgtggaatttgcaggtggagatttcagccgctttgtgttcaatggtagaataggaaatatcttcctatagaaactagacagaatgattctcagaaactcctttgagatgtgtgtgttcaactcacagagtttaaccttgcttttcatagagcagttaggaatcactctgtttgtaaagtctgcaagtggatattcagacctctttgaggccttcgctggaaacgggtttttttcatataaggctagacagaagaattctcagaatcttccttgtgttgtgtgtattcaactcacagagttgaacgatcctttacacagagcagatttgaaacactctttttgtggaatttgcaaatggagatttcaagcgctttgaggccaaaggcagaaaaggaaatatcttcgtataaaaactagacagaatcattctcagaaactgctctgcgatgtgtgcatgcaactctaagagtttaacttttcttttcattcagcagtttggaaacactctgtttgtaaagtctgcacgtggataatttgaccacttagaggccttcgttggaaacgggtttttttcatgtaaggctagacagaagaattcccagtaacttccttgtgttgtgtacattcaactcacagagttgaacgttcccttagacagagcagacttgtaacactctttttgtggaatttgcaagtggagatttcagccgctttgaaatcaaaggtagaaaaggaaatatcttcctataaaaactagacagaatgattctcagaaactcctttttgatgtgtgcgttcaactcacagagtttaacctttcttttcatagagcagttaggaaacactctgtttgtaaagtctgcaagtggatattcagacctctttgaggccttcgttggaaacgggatttcttcatattctgctagacagaagaattctcagtaacttccttgtgttgtgtgtattcaactcacagagttgaaagatcctttacacagagcattcttgaaacactctttttgtggaatttgcaagtggagatttcagacgctttgaggtcaatagtagaaaaggaaatatcttcgtagaaaaactagacagaatgattctcagaaactcctttgtgatgtgtgcgttcaactcacagagtttaaacctttcttttcatagagcagttaggaaacactctgtttgtaaagtctgcaagtggatattcagacctccttgagaccttcgttggaaacgggtttttttcatataaggctagacagaagaattctcagtaacttccttgtgttgtgtgtattcaactgacagcagttgaactttcatttagagagaggagatttgaaacactgtttttgtggaatttgcaagtggagatttcaaacgctttggggccaaaggcagaaaaggaaatatattcgtataaaaactagacagaatcattctcagaaactgctgcgtgatgtgtgcgttcgactctcagagtttaacttttcttttcattcagcggtttggaaacactctgtttgtatagtctgcacgtggatattttgaccacttagaggccttctttggaaacgggtttttttcatgtaaggctagacagaagaattcccaggaacttccttatgttgtgtacattcaactgagagagttgaacgttcccttagacagagcagatttgaaacactctttttgtgcaattggcaagtggtgatttcagccggtttgaggtcaatggtagaaaaggaaatatcttcgtataaaaactagacagaatcattaccacaaactgcgttgtgatgtgttcgttcaactcacagaatttaacctttctgttcatagagcagttaggaaacactctgtttgtaaagtctgtaagtggatattctgacatcttgtggccttcgttggaaacgggatttcttcatattctgctggacagaagaattctcagaatcttccttgtgttgtgtgtattcaactcacagagttgaacgatggtttacacagtagcagatttgaaacactcttttggtggaatttgcaagtggagatttcagccgctttgaggtcaatggtagaaaaggaaatatcttcgtataaaaactagacagaatgattctcagaaactgctttgtgatgtgtgcgttcaactcacagagtttaacctttcttttcatagagcagttaggaaacactctgtttgtaaagtctgcaagtggatattcagacctctttgaggccttcgttggaaacgggtttttttcatgtaaggctagacagaagaattctcagtaacttccttgtgttgtgtgtattcaactgacagagttgaactttcatttagagagagcagatttgaaacactgtttttgtggaatttgcaattggagatttcaagcgctttggggccaaaggcagaaaaggaaatatcttcgtataaaaactacacagaatcattctcagaaactgctctgcgatgtgtgcgttcaactctcagagtttaacttttcttttcattcagcagtttggaaacactctgtttgtaaagtctgcacgtggatattttgaccatttagaggccttcgttggaaacgggtttttttcctgtaaggctagagagaagaattcccagtaacttccttgtgttgtgtgcattcaactcacagagttgaacgttcccttagacagagcagatttgaaacactctatttgtgcaatttgcaagtgtagatttcaagcgctttaaggtcaatggcagaaaaggaaatatcttcgtttcaaaattagacagaatcattcccacaaactgcgttgtgatgtgttcgttcaactcacagactttaacctttctgttcatagagcagttaggaaacactctgtttgtaaagtctgcaagtggatattcagacctccttgaggccttcgttggaaacgggatttcttcatattctgctagacagaaagaattctcagtaacttccttgtgttgtgtgtattcaactcacagagttgaacgatcctttacacagagcagacttgaaacactctttttgtggaatttgcaagtggagatttcagccgctttgaggtcaaaggtagaaaaggaaactatcttcatataaagactagacagatgattctcagaaactcctttgtgatgtgtgcgttcaacccacagagttcaacctttcttttcatagagcagttgggaaacactctgtttgtaaagtctgcaagtggatattcagacttctttgaggccttcgttggaagcgggatttcttcatattctgctagacagaagaattcccagtaacttccttgtgttgtgtgtattcaactcacagagttgaactttcatttacacaggagcagatttgaaacactctttttgtggaatttgcaaatggagatttcaagccctttcaggccaaaggcagaaaaggaaatatcttcgtataaaaactagacagaatcattctcagaaactgctgcgtgatgtgtgcgatcaactctcagagtttaacttttcttttcattcagcggtttggaaacactctgtttgtaaagtctgcacgtggatattttgaccacttagaggccttcgttggaaacgggttttcttcatgtaaggctagacagaagaattcccagtaacttccttgtgttgtgtacattcaactcacagagttgaacgttcccttagacagagcagatttgaaacactctttttgtgcaattggcaaatggagatttcaagcgctttaaggtcaatggcagaaaaggaaatattcttcgtttcaaaactagacagaatcattcccacaaactgcgttgtgatgtgttcgttcaactcacagaagtttaacctttctgttcatagagcagttaggaaacactctgtttgtaaagtctgcaagtggatattcagacctccttgaggccttcgttggaaacgggatttcttcatattctgctagacagaagaattctcagaatcttccttctgttgtgtgtattcaactcacagagttgaacgttcctttacacagagcagacttgaaacactctttttgtggaatttgcaagtggagatttcagccgctttgaggtcccatggtagaaaaggaaatatcttcgtataaaaactagacagatagattctcagaaactcctttgtgatgtgtgcgttcaactcacagagtttaacctttcttttcatagagcagttaggaaacactctgtttgtaaagtctgcaagtggatattcagacctctttgaggccttcgttggaaacgggtttttttcatataaggctagacagaagaattctcagtaacttccttgtgttgtgtgtattcaactgacagagttgaactttcatttagagagagcagatttgaaacagtgtttttgtggaatttgcaagtggagatttcaagcgctttggggccaaaggcagaaaaggaaatatcttcgtataaaaactagacagaatcattctcagaaactgctgcgtgatgtgtgcgttcaactcacagagtttaagttttcttttcattcagcggtttggaaacactctgtttgtaaagtctgcacgtggatattttgaccacttagaggccttcgttggaaacgggattttttcatgtaaggctagacagaagaattcccagtaacttccttgtgttgtgtatattcaactcacagagttgaacgttcccttagacagagcagatttgaaacactctttttgtgcaattggcaagtggagatttcaagcgctttaaggtcaatggccgaaaaggaaatatcttcgtttcaaaactagacagaatcattcccacaaactgcgttgtgatgtgttcgttcaactcacagagtttaacgtttattttcatagagccgttaggaaacactctgtttgtaaactctgcaagtggatattcagacctctttgaggccttcgttggaaacgggatttcttcatattctgctagacagaagaattctcagtaacttccttgtgttgtgtgtattcaactcacagagttgaacgatcctttacacagagcagacttgaaacactctttttgtggaatttgcaagtggagatttcagccgctttgaggtcaatagtagaaaacgaaatatcttcgtagaaaaactagacaaaatgattctcagaaacttctttgtgatgtgtgcgttcaactcacagagtttaacctttcttttcatagagcagttaggaaacactctgtttgtaaagtctgcaagtggatattcagacctctttgaggccttctttggaaacgggtttttttcatataaggctagacagaataattctcagaatcttccttgtgttgtgtgtattcaactgacagagttgaactttcatttagagagagcagatttgaaacactgtttttgtggaatttgcaagtggagatttcaagcgctttggggccaaaggcagaaaaggaaatatcttcgtataaaaactagacagaatgattctcagaaactcctttgtgatgtgtctgttcaactcacagagtttaacttttcttttcattcagcggtttggatacactctgtttgtaaagtctgcacgtggatattttgaccacttagaggccttcgttggaaacgggttttttgaatgtaaggctagacagaagaattcccagtaacttccttgtgttgtctacattcaactcacagagttgaacgttcccttagacagaacagatttgaaacactctttttgtgcaattggcaagtggtgatttcagccgctttgaggtcaatggtagaaaaggaaatatcttcgtataaaaactagacagaatcattcccacaaactgcgttgtgatgtgttcgttcaactcacagagtttaacctttcttttcatagagcagtgaggaaacagtctgtttgtcaattctgtaagtggatattctgacatcttgtggccttagttggaaacgggatttcttcatattctgctagacagaagaattcttagaaacttccttgtgttgtgtgttttcaactcacagagttgaacgatcctttacacagagcagacttgaaacactccttttgtggaatttgcaagtggagatttcagccgctttgaggtcaatggtagaataggaaatatcttcctatagaaagtagacagaatgattctcagaaactcctttgtgatgtgtgcgttcaactcacagagtttaacctttcttttcatagagcagttaggaaacactctgtttgtaaagtctgcaagtggatattcagacctccctgaggccttcgttggaaacgggatttcttcatattctgctacacagaagaattcccagtaacttccttgtgttgtgtgtgttcaactcacagagttgaactttcatttacacagagcagatttgaaacactcgttttgtggaatttgcaagtggagatttcaagcgctttgaggccaaaggcagaaaaggaaatatcttcgtataaaaactagacagaatcattctcagaaactgctctgtgatgtgtgcgttcaactctcagagtttaacttttcttttcatttagcagtttggaaacactctgtttgtaaagtctgcacgtggataatttgaccacttagaggccttcgttggaaacgggtttttttcatgtaaggctagacagaagaattccaagtaacttccttgtgttgtgtacattcaactcacagagttgaacgttcccttagacagagcagatttgaaacactctttttgtgcaattggcaaatgtagatttcaagcgctttaaggtcaatggcagaaaaggaaatatcttcgtttcaaaactagacagaatcattcccacaaactgcgttgtgatgtgttcgttcagctcacagagtttaacctttcttttcatagagcagttaggaaacagtctgtttgtcaattctgtaagtggatattctgacatcttgtggccttcgttggaaacgggatttcttcatattctgctagacagaataattctcagtaaattccttgtgctgtgtgtattcaactcacagagttgaacgatcctttacagagagcagacttgaaacactctttttgtggaatttgcaagtggagatttcagccgcttggaggtcaatggtagaataggaaatatcttcctatagaaactagacagaatgattctcagaaactcctttgtgatgtgtgcgttcaactcacagagtttaacctttcttctcatagagcagttaggaaacactctgtttataaaggctgcaagtggatattcagaaccctttgaggcgttcgttggaaacgggatttcttcatattatgctagacagaagaattcccagtaacttccttgtgttgtgtgtgtttaactcacagagttgaactttcatttacacagagcagatttgaaacactctttttgtggaatttgcaggtggagatttcaagcgctttgaggccaaaggcagaaaaggaaatatcttcgtataaaaactagacagaatcattctcagaaactgctctgcgatgtgtgggttcaactctcagagtttaacttttcttttcattcagcagtttggaaacactctgtttgtaaagtctgcacgtggatattttgaccacttagaggccttcgttggaaacgggtttttttcctgtaaggctagacagaagaattcccagtaactttccttgtgttgtgtgcattcaactcacagagatgaacgttcgcttagacagagcagatttgaaacactctatttgtgcaatttgcaagtgtagatttcaagcgctttaaggtcaatggcagaaaaggaaatatcttcgtttcaaaactagacagaatcattcccacaaactgcgttgtgatgtgttcgttcaactcacagagtttaacctttctgttcatagagcagttaggaaacactctgtttgtaaagtctgtaagtggatattctgacatcttgtggccttcgttggaaacgtgatttcttcatattctgctagacagaagaattctcagaatcttccttgtgttgtgtgtattcaactcacagagttgaacgatcctttacacagagcagacttgaaacactctttttgtggaatttgcaagtggagatttcagccgctttgaggtccatggtagaaaacgaaatatcttcgtataaaaactagacagaatgattctcagaaactcctttgtgatgtgtgcgtccaagtcacagagtttaacctttcttttcatagagcagttaggaaacactctgtttgtaaagtctgcaagtggatattcagacctctttgaggccttcgttggaaacgggatttcttcatattctgctagacagaagaattctcagaatcttccttgtgttgtgtgtattcaactcacagagttgaacgatggtttacacagagcagatttgaaacactctttttgtggaatctgcaagtggagatttcagccgctttgaggtcaatggtagaaaaggaaatatcttcgtataaaaactagacagaatgattctcagaaactcctttgtgatgtgtgcgttcaactcacagagtttaacctttcttttaatagagcatttaggaaacactctgtttgtaaagtctgcaagtggataatcagacctctttgaggccttcgttagaaacgggatttcttcatattctgctagacagaagaattcccaataacttccttgtgttgtgtgtgttcaactcacagagttgaactttcatttacacagagcagatttgaaacactctttttgtggaatttgcaaatggagatttcaagcgctttgaggccaaaggcagaaaaggaaatatcttcgtatacaaaatacacagaatcattctcagaaactgctgcgtgatgtgtgcgttcaactctcagagtttaacttttcttttcattcagcggtttggaaacactctgtttgtaaagtctgcacgtggatattttgaccacttagagaccttcgttggaaacgggtttttttcatgtaaggctagacagaagaattcccagtaacttccttgtgttgtgcgcattcaactcacagagttgaacgttcccttagacagagcagatttgaaacagcctatttgtgcaatttgcaagtgtacatttcaagcactttaaggtcaacggcagaaaaggaaatatcttcctttcaaaactagacagaatcattcccacaaactgcgttgtgatgtgttcgttcaactcacagagtttaacctttcttttcatagagcagttaggaaacagtctgtttgtaaattctgtaagtggatattctgacatcttgtggccttcgttggaaaagggatttcttcatattctgctagacagaagaattctcagtaacttccttgtgttgtgtgtattcaactcacagagttgaacgatcctttacacagagcagacttgaaacactctttttgtggaatttgcaagtggagatttcagccgctgtgaggtcaatagtagaaaaggaaatatcttcgtagaaaaactagacagaatgattctcagaaactcctttgtgatgtgtgtgttcaactcacagagtttaacctttcttttcatagagcagttaggaaacactctgtttgtaatgtctgcaagtggatattcagacctctttgaggacttcgttggaaacgggtttttttcatataaggctagacagaagaattcccaataacttccttgtgttgtgtgtgttcaactcacagagttgaactttcatttacacagagcagatttgaaacactctttttgtggaatttgcaaatggagatttcaagcgctttgaggccaaaggcagaaaaggaaatatcttcgtataaaaactacacagaatcattctcagaaactgctctgcgatgtgtgcgttcaactctcagagtttaacttttcttttgattcagcagtttggaaacactctgtttgtaaagtctgcacgtggatattttgaccacttagaggccttcgttggaaacgggtttctttcctgtaaggctagacagaagaattcccagtaacttccttgtgttgtgtaaattcaactcacagagttgaacgttcccttagacagagcagatttgaaacactctttttgtgcaattggcaagtggagatttcaagcgctttaaggtcaatggcagaaaaggaaatatcttcgtttcaaaactagacagaatcattaccacaaactgcgttgtgatgtgttcgttcatctcacagagtttaacctttcttttcatagagcagttaggaaacagtctgtttgtaaattctgtaagtggatattctgacatcttgtggccttcgttggaaacgggatttcttcatattctgctagacagaagaatactcagtaacttccttgtgttgtgtgtattcaactcacagagttgaacgatcctttacacagagcagacttgaaacactctttttgtggaatttgcaagtggagatttcagccgctttgaggtcaatagtagaaaaggaaatatcttcctagaaaaactagacagaatgattctcagaaactcctttgtgatgtgtgcgttcaactcacagagtttaacatttcttttcatagagcagttaggaaacactctgtttgtaaagtctgcaagtggatattcagacctctttgaggccttctttggaaacgggtttttttcatataaggctagacagaagaattcccagtaacttccttttgttgtgtgtgttcaactcacagagttgaactttcacttacacagagcagatttgaaacactctttttgtggaatttgcaagtggagatttcaagcgctttgaggccaaaggcagaaaaggaaatatcttcgtataaaaactagacagaatcattctcagaaaccgctctgtgatgtgtgtgttcaactctcagagtttaacttttctttccattcagcagtttggaaacactctgtttgtaaagtctgcacgtggatattttgaccacttagaggtcttcgttggaaacgggtttttttcatgtaaggctagacagaagaattcccagtaacttccttgtgttgtgtgcattctactcagagagttgaacgttcccttagacagagcagatttgaaacactctatttgtgcaaattgcaagtgtagatttcaagcgctttaaggtcaatggcagaaaagggaatatcttcgtttcaaaactagacagaatcattccctcaaactgcgttgtgatgtgttcgttcaactcacagagtttaacctttctgttcatagagcagttaggaaactctctgtttgtaaagtctgtaagtggatattctgacatcttgtggccttcgttggaaacgggatttcttcatattctgctagacagaagaattctcagtaacttccttgtgttgtgtgtattcaactcacagagttgaacgattctttacacagagcagacttgaaacactctttttgtggaatttgcaagtggagatttcagccgctttgaggtcaatggtagaaaaggaaatatcttcgtataaagagtagacagaatgattctcataaactcctttgtgatgtgtgcgttcaactcacagagtttaacttttcttttcatagagcagttaggaaacactctgtttgtaaagtctgcaagtggatattcagacctctttgaggccttcgttggaaacgggatttcttcatattttgctagacagaagaattctcagtaacttccttgtgtggtgtgtattcaactgacagagttgaactttcatttagagagagcagatttgaaacactgtttttgtggaatttgcaagtggagatttcaagcgctttggggccaaaggcagaaaaggaaatatcttcgtataaaaagtagacagaatcattctcagaaaatcctctgtgatgtgtgcgttcaactctcagagtttaacttttcttttcattcagcagtttggaaacactctgtttgtaaagtctgcacgtggatattttgaccacttagaggccttcgttggaaacgggttttttcatgtaagggtagacagaagaaatcccagtaacttccttgtgttgtgtgcattcaactcacagagttgaacgttcccttagacagagcagatttgaaacactctatttgtgcaatttgcaagtgtagatttcaagtgctttaaggtcaacggcagaaaaggaaatatcttcgtttcaaaactagacagaatcattctcagaaactgctctgcgatgtgtgcgttcaactctcagagtttaacttttcttttcattcagcagtgtggaaaaactctgtttgttaagtctgcacgtggatattttgaccacttagaggccttcgttggaaacgggtttttttcctgtaaggctagacagaagaattctcagtaacttccttgtgctgtgtgtattcaactcacagagttgaacgatcctttacagagagcagactttaaacactctttttgtggaatttgcaagtggagacttcagccgctttgaggtcaatggtagaaaaggaaatatcttcgtataaagactagacagaaagattctcagaaactcctttgtgatgtgtgcgttcaactcacagagtttaacctttcttttcatagagcagttaggaaacactctgtttctaaagtctgcaagtggatattcagacctctttgaggccttcgttggaaacgggtttttttcatataaggctagacagaagaattcccagtaacttccatgtgttgtgtgtgttcaactcagagagttgaactttcatttacactgagcagatttgaaacactctttttgtagaatttgcaaatggagatttcaagcgctttgaggccagaggcagaaaaggaaatatcttcgtataaaaactagacagaatcattctcagaaactgctctgcgatgtgtgcgttcaactctcagagtttaacttttcttttcattcagcagtttggaaacactctgtttgtaaagtctgcacgtggataatttgaccacttagaggtcttcgttggaaacgggtttttttcatgtaaggctagacagaagaattcccagtaacttccttgtgttgtgtgcattcaactcacagagttgaacgttcccttagacagagcagatttgaaacactctatttgtgcaatttgcaagtgtagttttcaagctctttaaggtcaacggcagaaaaggaaatatcttggtttcaaaactagacagaatcattcccacaaactgcgttgtgatgttttcgttcaactcacagagtttaacctttctgttcatagagtagttaggaaacactctgtttgtaaagtctgtaagtggatattctgacatcttgtggccttcgttggaaacgggatttcttcatattctgctagacagaagaattctcagtaacttccttgtgttgtgtgtattcaactcacagagttgaacgatcctttacacagagcggacttgaaacactctttttgtggaatttgcaagtggagattttagccgatttgaggtcaatggtagaataggaaatatcttcctatagaaacaagacagatagattctcagaaactcctttgtgatgtgtgcgttcaactcacagagtttaacctttcttttcatagagcagttaggaaacactctgtttgtaaagtctgcaagtggatattcagacctctttggggccttcgttggaaacgggtttttttcatataaggctagacagaagaattctcagtaacttccttgtgttgtgtgtattcaactgacagagttgaactttcatttagagagagcagatgtgaaacactgtttttgtggaatttgcaagtggagatttcaagcgctttggggccaaaggcagaaaaggaaatatcttcgtataaaaactagacagaatcattctcagaaactgctgcgtgatgtgtgcgttcaactctcagagtttaacttttcttttcattcagcggtttggaaacactctgtttgtaaagtctgcacgtggatattttgaccacttagaggccttcgttggaatcgggttttttgcatgtaaggctagacagaagaattcttagtaacttccttgtgttgtgtgtattcaactcacagagttgaacgatcctttacacagagcagacttgtaacactctttttgtggaatttgcaagtggagatttcagccgctttgaagtcaaaggtagaaaaggaaatatcttcctataaaaactagacagaatcattcccacaaactgcgttgtgatgtgttcgttcaactcacagagtttaacctttctgttcatagagcagttaggaaacactctgtttgtaaagtctgtaagtggatattcagacatcttgtggccttcgttggaaacgggatttgttcatattctgctagacagaataattctcagtaacttccttgtgttgtgtgtattcaactcacagtagttgaaggatcctttacagacagcaggcttgaaacactctttttgtcgaatttgcaagtggagatttcagccgctttgtggtcaatggtagaatacgaaacatcttcttatagaaactagacaaaatgattctcagaaactcctttgtgatgtgtgcgatcaactcacagagtttaacctttcttttcatagagcagttaggaaacactctgtttgtaaagtctgcaagtggatattcagacctctttgaggccttcgttggaaacgggttgttttcatataaggctagacagaagaattcccagtaacttccttgtgttgtgtgtgttcaactcacagagttgaactttcatttacacagagcagattggaaacactctttttgtggaatttgcaagtggagatttcaagcgctttgaggccaaaggctgaaaaggaaatatcttcgtataaaaactagacagaatcattctcagaaactactctgcgatgtttgcgttcaactctcagagtttaacttttcttttcattcagcagtttggaaacactctgtttgtaaagtctgcacatggatattttgaccacttagaggccttcgttggaaacgggtttctttcctgtaaggctagacagaagaattcccagtaacttccttgtgttgtgtgcattcaactcacagagttgaacgttcccttagacagagcagatttgaaacactctatttgtacaatttgcaagtgtagatttcaagcgctttaaggtcaacggcagaaaaggaaatatcttcgtttcaaaactagacagaatcattcccacaaactgcattgtgatgtgttcgttcaactcacagagtttaacctttctgttcatagagcagttaggaaacactctgtttgtaaagtctgcaagtgcatattcagacctctttgaggccttcgttggaaacgttatttcttcatattatgctagacagaagaattctcagtaacttccttgtgttgtgtgtattcaactcacagagttgaacgatcctttaaacagagcagacttgaaacactctttttgtggaatttgcaagtggagatttcagccgctttgaggtcaatggtagaaaaggaaatatcttcgtatagaaacaagacagaatgattctcagaaactcctttgtgatgtgtgcgttcaactcacagagtttaacctttctttgcatagagcacttaggaaacactctgtttgtaaagtctgcaagtggatattcagacctctttgaggccttcgttggaaacgggtttttttcatataaggctagacagaagaattctcagtaacttccttgtgttgtgtgtattcaactgacagagttgaactttcatttagagagagcagatttgaaatactgtttttgtggaatttgcaagtggagatttcaaacgctttggggccaaaggcagaaaaggaaatatcttcgtatgaaaactagacagaatcattctcagaaactgctgtgtgatgtgtgcgttcaactctcagagtttaacttttcttttcattcagcggtttggaaacactctgtttgtaaagtctgcacgtggatattttgaccacttagagcccttcgttggaaacgggattttttcatgtaaggctagacagaagaattcccagtaacttccttgtgttgtgtgcattcaactcacagagttgaacgttctcttagacagagcagatttgaaacactctatttgtgcaatttgcaagtgtagatttcaagcgctttaaggtcaatggcagaaaaggaaatatcttcgtttcaaaactagacagaatcattcccacaaactgcgttgtgatgtgttcgttcaactcacagagtttaacctttctgttcatagagcagttaggaaacacgctctttgtaaagtccgtaagtggatattctgacatcttctggccttcgttggaaacgggatttcttcatattccgctagacagaagaattctcagtaacttccttgtgttgtgtgtattcaactcacagatttgaacgatcctttacacagagcagacttgaaacactctttttgtggaatttgcaagtggagatttcagccgctttgaggtcaatggtagaaaaggaaatatcttcgtataaaaactagacagaatgattctcagaaacttctttgtgatgtgtgcgttcaactcacagagtttaacctttctattcatagagcagttaggaaacactctgtttgtaaactctgcaagtggatattcagacctctttgaggccttcgttggaaacgggatttcttcatactgtgctagacagaagaattctcagtaacttccttgtgttgtgtgtattccactcacagagttgaactttcatttagagagagcagatttgcaacactgtttttgtggaatttgcaaatggagatttcaagcgctttggggccaaaggcagaaaaggaaatatcttcgtataaaaactagacagaatcattctcagaaactgctctgcgctgtgtgcgttcaactctcagagtttaacttttcttttcattcagcagtttggaaacactctgtttgtaaagtctgcacgtggataacttgaccacttagaggccttcgttggaaacgggtttttttcctgtaaggctagacagaagaattcccagtaacttccttgtgttgtgtgcattcaactcacagagttgaacgttcccttagacagagcagatttgaaacactctatttgtgcaatttgcaagtgtagttttcaagctctttaaggtcaacggcagaaaaggaaatatcttcgtttcaaaactagacagaatcattcccacaaactgcgttgtgatgtgttcgttcaactcacagagtttaacctctctgttcatagagcagttaggaaacactctgtttgtaaagtctgtaagtggatattctgacatcttgtggccttcgttggaaacgggatttcttcatattctgctagacagaagaattctcagaaacttcctggtgttgtgtgttttcaactcacagagttcaacgatcctttacacagagtagacttgaaacactctttttgtggaattggcaagtggagatttcagccgctttgaggtaaagggtagaaaaggaaatatcttcgtacaaaaactagacagaatgattctcagaaactcctttgtgatgtgtgcgttcaactcacggagtttaccctttcttttcatagagcagttaggaaacactctgtttgtaaagtctgcaagtggatattcagacatccttgaggctttcgttggaaacgggatttcttcatattctgctagaaagaagaattcccagtaacttaccttgtgttgtgtgtgttgaactcacagagttgaactttcatttacacagagcagatttgaaacactctttttgtggaatttgcaagtggagatttcaagcgctttcaggccaaaggcagaaaaggaaatatcttcgtataaaaactagacagaatcattctcagcaaactgctctgcgatgtgtgcattcaactctcagagtttaacttttcttttcattcagcagtttggaaacactctgtttgtaaagtctgcacgtggataacttgaccacttagaggccttcgttggaaacgggtttttttcatgtaaggctagacagaagaattcccagtaacttccttgtgttgtgtacattcaactcacagagttgaacgttcccttagacagagcagatttgaaacactctttttgtgcaattggcaagtggagatttcaagcgctttaaggtcaatggcagaaaaggaaatattttcgtttcaaaactagacagaatcattcccacaaactgcgttgtgatgtgttggtacaactcacagagtttaacctttctgttcatagagcagttaggaaacactctgtttgtaaagtctgtaagtggatattcagacatcctgtggccttcgttggaaacgggatttcttcatattctgctagacagaagaattctcagtaacttccttgtgttgtgtgtattcaactcacagagttcaacgatcctttacacagagcagtcttgaaacactctttttgtggaatttgcaagtggagatttctgacgctttgaggtcaatggtagaataggaaatatcttcctatagaaactagacagaatgattctcagaaactcctttgagatgtgtgtgttcaactcacagagtttaacctttcttttcatagagcagttaagaatcactctgtttgtaaagtctgcaagtggatattcagacctctttgaggccttcgttggaaacgggtttttttcatataaggctagacagaagaattctcagaaacttccttgtgttgtgtgttttcaactcacagagttgaacgatcctttacacagagcagacttgaaactctctttttgtggaatttgcaattggagatttcagccgctttgaggtcaatggtagaataggaaataccttcctatagaaactagacagaatgattctcagaaactcctttgtgatgtgtgcgttgaactcacagagtttaacctttcttttcatagagcagttaggaaacactctgtttgtaaagtctgcaagtggatattcagacatctttgaggctttcgttggaaacgggatttcttcatattctgctagacagaagaattcccagtaacttccttgtgttgtgtgtgttcaactcacagagttgaactttcatttacacagagcagatttgaaacactctttttgtggaatttgcaagtggagatttcaagcgctttgaggccaaaggcagaaaaggaaataccttcgtataaaaactagacagaatcattctcagaaactgctctgcgatgtgtgcgttcaactctcagagtttaacttttcttttcattcagcagtttggaaacactctgtttgtaaagtctgcacgtggatattttgaccacttagaggccttcgttggaaacgggtttttttcctgtaatgctagacagaagaattcccagtaacttccttgtgttgtgtgaattcaactcacagagttgaacgttcccttagacagagcagatttgaaacactctatttgtgcaatttgcaagtgtagatttcaagcgctttaaggtcaacgccagaaaaggaaatatcttcatttcaaaactagacagaatcattcccacaaactgcgttgtgatgtgttcgttcaactcacagagtttaacctttctgttcatagagcagttaggaaacactctgtttgtaaagtctgtaagtggatattcagacatcttgtggccttcgttggaaacaggatttcttcatattctgctagacagaagaattctcagaatcttccttgtgttgtgtgtattcaactcacacggttgaacgatcctttacacagagcagatttgaaacactcatttggtggaatttgcaagtggagatttcagccgctttgaggtcaatggtagaaaaggaaatatcttcgtataacaactagacagaatgattctcagaaactcctttgtgatgtgtgcgttcaactcacagagtttaacctttcttttcatagagcagttaggaaacactctgtttgtaaagtctgcaagtggatattcagacctccttgaggtcttcgttggaaacgggtttttttcatataaggctagacagaagaattcccagtaacttccttgtgttgtgtgtgttcaactcacagagttgaactttcatttacacagagcagatttgaaacactctttttgtggaatatgtaagtggagatttcaagcgctttgaggccaaaggcagaaaaggaaatatcttcgtttcaaaactagacagaatcattctcagaaactgctgcgtgatgtgtgcgttcaactctcagagtttaacttttcttttcattcagcggtttggaaacactctgtttgtaacatctgtacgtggatattttgaccacttagaggccttcgttggaaacgggtttttttcatgtaaggctagacagaagaattcccagtaacttccttgtgttgtgtgcattcaactcacagagttgaacgttcccttagacagagcagatttgaaacactctatttgagcaatttgcaagtgtagttttcaagctcttttaggtcaacggcagaaaaggaaatatcttggtttcaaaactagacagaatcattcccacaaactgcgttgtgatgtgttcgttcaactcacagcgttttacctttctgttcatagagcagttaggaaacactctgtttgtcaagtctgtaagtggatattctgacatcttgtggccttcgttggaaatgggatttcttcatattctgctagacagaagaattctcagtaacttccttgtgttgtgtgtattcaactcacagagttgcacgatcctttacacagagcagacttgaaacaatctttttgtggaatttgcaagtggagatttcagccgctttgagttcaatggtagaataggaaatatcttcctatagaaactagacagaatcattcccacaaactgcgttgtgatgtgttcgttcaactcacagagtttaacctttctgttcatagagcagttaggaaacaccctgtttgtaaagtctgcaagtggatattcagacctctttgaggccttcgttggaaacgggatttcttcatattatgctagacagaagaattctcagtaacttccttgtgttgtgtgtattcaactgacagagttgaactatcatttagagagagcagatttgaaacactgtttttgtggaatttgcaagtggagatttcaagcgctttggggccaaaggcagaaaaggaaatatcttcgtataaaaactagacagaatcattctcagaaactgctctgcgatgtgtgcgttcaactctcagagtttaacttttcttttcattcagcagtttggaaacactctgtttgtaaagtctgcacgtggatattttgaccacttagaggccttcgttggaaacgggtttttttcctgtaaggctaaacagaagaattcccagtaacttccttgtgttgtgtacattcaactcacagagttgaacgttcacttagacagagcagatttgaaacactctttttgtgcaattggcaaatggagatttcaagcgctttaaggtcaatggcagaaaaggaaatatcttcgtttcaaaactagacagaatcattcccacaaactgcgttgtgatgtgttcgttcaactcacagagtttaacctttcttttcatagagcagttaggaaacagtctgtttgtcaattctgtaagtggatattctgacatcttgtgaccttcgttggaaacgggatttcttcatattctgctagacaaaagaattctcagtaacttccttgtgttgtgtttattcaactcacagagttgaatgatcctttacacagagcagacttgaaacactctttttgtggaatttgcaagtggagattacagccgctttgaggtcaatggtagaaaagtaaatatcttcgtataaagactagacagaatgattctcagaaactcctttgtgatgtgtgggttcaactcacagagtttaacctttctttttcatagagcagttaggaaacactctgtttgtaaagtctgcaagtggatattcagacctcgttgaggccttcgttggaaacgggatttcttcatattctgctagacagaagaattctcagtaacttccttgtgttgtgtttattcaactcacagagttgaatgatcctttacacagagcagacttgaaacactctttttgtggaatttgcaagtggagatttcagccgctttgcggtcaatggtagaaaagtaaatatcttcgtataaagactagacagaatcatgctcagaaactgctctgcgatgtgtgcgttcaactctcagagtttaacttttcttttcattcagcagtttggaaacactctgtttgtaaagtctgcacgtggataatttgaccacttagaggccttcgttggaaacgggtttttttcatgtaaggctagacagaagaattcccagtaacttccttgtgttgtgtgcattcaactcacagagttgaacgttccctttgacagagcagatttgaaacactgtatttgtgcaatttgcaagtgtagatttcaagcgctttaaggtcaatggcagaaaaggaaatttcttcgtttcaaaactagacagaatcattcccacaaactgcgttgtgatgtgctcgttcatctcacagagtttaacctttcttttcatagagcagttaggaaacactctgtttgtaaattctgtaagtggatattctgacatcttgtggccttcgctggaaacgggatttcttcatattctgctagacagaagaattctcagtaacttcccttgtgttgtgtgtattcaactcacagagttgaacgatcctttacacagagcagacttgaaacactctttttgtggaatttgcaagtggagatttcagccgctttgaggtcaatggtagaataggaaatatcttcctatagaaagtagacagaatgattctcagaaactcctttgtgatgtgtgcgttcaactcacagagtttaacctttcttttcatagagcagttaggaaacactctgtaaagtctgcaagtggatattcagacatctttgaggccttcgttggaaacgggatttcttcatattatgctagacagaagaattctcagtaacttccttgtgttgtgtgtattcaactgacagagttgaactttcatttagagagagcagatttgaaacactgtttttgtggaatttgcaagtggagatttcaatcgctttggggccaaaggcagaaaaggaaatatcttcgtataaaaactagacagaatcattctcaaaaactgctgcgtgatgtttgcgttcaactctcagagtttaacttttcttttcattcagcggtttggaaacactctgtttgtaaagtctgcacgtggatattttgaccacttagaggccttcgttggaaacgggtttttttcatgtaaggctagacagaagaattcccagtaacttccttgtgttgtgtgcattcaactcacagagttgaacgttcccttagacagagcagatttgaaacactctatttgtgcaatttgcaagtgtagatttcaagcgctttaaggtcaacggccgaaaaggaaatatcttcgtttcaaaactagacagaatcattcccacaaactgcgttgtgatgtgttcgttcaactcacagagtttaacctttctgttcatagagcagttaggaaacactctgtaaagtctgtaagtggatattctgacatcttgtggccttcgttggaaacgggatttcttcatattctgctagacagaagaattcccagtaacttccttgtgttgtgtgtgttcaactcacagagttgaactttcatttacacagagcagatttgaaacaccctttttgtggaatttgcaaatggagatttcagccgcgttgaggtcaatggtagaaaaggaaatatcttcgtttcaaaactagacagaatgattctcagaaactcctttgtgatgtgtgccttcaactcacagagttcaacctttctttttatagagcagttgggaaacactctgtttgtaaagtctgcatgtgcatattcagagttctttgaggccttcgttggaagcgggatttcttcatattctgctagacagaagaattctcagtaacttccttgtgttgtgtgtattcaactcacagagttgaacgatcctttacacagagcagacttgaaacactctttttgtggaatttgcaattggagatttcagccgctttgaggtcaatggtagaataggaaatatcttcctatagaaactagacagaatcattctcagaaactgctctgcgatgtgtgcgttcaaatctcagagtttaacttttcttttcattcaacagtttgaaaacactctgtttgtaaagactgcacgtggatattttgaccacttagaggccttcgttggaaacgggtttttttcctgtaaggctagacagaagaattcccaggaacttccttgtgttgtgtacattcaactcacagagttgaacgttcccttagacagagcagatttgaaacactctttttgtgcaattggcaagtggtgatttcagcctctttgaggtcaatggtagaaaaggaaatatcttcgtataaaaactagacagaatcattcccacaaactgcgttgtgatgtgttcgttcaactcacagagtttaacatttctgttcatagagcagttaggaaacactctgtttgtaaagtctgtaagtggatattctgacatcttgtggccttcgttggaaacgggatttcttcatattctgctagacagaataattctcagtaacttccttgtgttgtgtgtactcaactcacagagttgaacgatcctttacagagagcagacttgaaacactctttttgtggaatttgcaagtggagatttcagccgctttgaggtcaatggtagaaaaggaaatatctttgtataaagactagacagaatgattctcagaaactcctttgtgatgtgtgcgttcaactcacagagtttaacctttcttttcatagagcagttaggaaacactctggttgtaaagtctgcaagtggatattcagacctctttgaggccttcgttggaaacgggatttcttcatattctgctagacagaagaattcccagtaacttccttgtgttgtgtgtattcaactcacagagttgaacgatcctttacacagagcagtcttgaaacactctttttgtggaatttgcaagtggagatttctgccggtttgaggtcaatggtagaataggaaaaaacttcctatagaaactagacagaatgattctcagaaactgctgcgtgatgtgtgcgttcaactctcagagtttaacttttcttttcattcagcggtttggaaacactctgtttgtaaagtctgcacgtggatattttgaccacttagaggccttcgttggaaacgggtttttttcatgtaaggctagacagaagaattcccagtaacttccttgtgttgtgtacattcaactcacagagttgaacgttcccttagacacagcagatttgaaacactctttttgtgcaattggcaagtggagatttcaagcgctttaaggtcaatggcagaaaaggaaatatcttcgtttcaaaactagacagaatcattcccacaaactgcgttgtgatgtgttcgttcaactcacagagtttaacctttcttttcatagagcagttaggagacactctgtttgtaaagtctgcaagtggatattcagacctctttgaggccttcattggaaacgggatttcttcatattatgatacacagaagaattctcagtaacttccttgtgttttgtgtattcaactcacagagttgaacgatcctttacacagagcagacttgaaacactctttttgcggaatttgcaagtggagatttcagccgctttgaggtcaatggtagaataggaaatatcttcctatagaaactagacagaatgattctcagaaactcctttgtgatgtgtgcgttcaactcacagagttcaacctttcttttcatagagcagttgggaaacactctgtttgtaaagtctgcaagtggatattcagacttctttgaggccttcgttggaaacgggatttcttcatattatgctagacagaagaattctcagtaacttcttgtgttgtgtgtattcaactgacagagttgaactttcatttagacagatcagatttgaaacactgttttcgtggaatttgcaagtggaggtttcaagcgctttgaggccaaaggcagaaaaggaaatatcttcctataaaaaccagacagaatcattctcagaaactgctctgcgatgtgtgcgttcaactctcagagtttaactttgcttttcattcagcagtttggaaacactctgtttgtaaagtctgcacgtggataattagaccacttagaggccttcgttggaaacgggtttttttcatgtaaggctagacagaagaattcccagtaacttccttgtgttgtgtgcattcaactcacagagttgaacgttcccttagacagagcagatttgaaacactctatttctgcaatttgcaagtgtagatttcaagcgctttaaggtcaatggcagaaaaggaaatatcttcgtttcaaaactagacagaatcattcccacaaactgcgttgtgatgtgttcgttcaactcacagagtttaacctttcttttcatagagcagttaggaaacagtctgtttgtaaattctgtaagtggatattctgacatcttttggccttcgttggaaacgggatttcttcatattctgctagacagaagaattctcagaatcttccttgtgttgtgtgtattccactcacagagttgaacgatggtttacacagagcagatttgaaacactctttgtgtggaatttgcaagtggagatttcagccgctttgaggtcaatggtagaaaaggaaatatcttcgtataaaaactagacagaatgattctcagaaactcctttgtgatgtgtgtgttcaactcacagagtttaacctttcttttcatagagcagttagtaaacactctgtttataaagtctgcaaatggatattcagacccctttgaggccttcgttggaaacgggatttcttcatattatgctagacagaagaattcccagtaacttccttgtgttgtgtgtgttcaactcacagagttgaactttgatttacacagagcagatttgaaacactctttttgtggaatttgcaagtggagatttcaagcgctttgtggccaaaggcagaaaaggaaatatcttcgtataaaaactagacagaatgattctcagaaactcctttgtgatgtgtgcgttcaactcacagagtttaacctttcttttcattcagcggtttggaaacactctgtttgtaaagtctgcacgtggatattcagacctctttgaggccttcgttggaaacgggtttttttcatgtaaggctagacagaagaattcccagtaacttccttgtgttgtgtgcattcaactcacagagttgaacgttcccttagacagagcagatttgaaacactctatttgtgcaatttgcaagtgtagttttcaagctctttaaggtcaacggcagaaaaggaaatatcttggtttcaaaactagacagaatgattctcagaaactcctctgtgatgtgtgcgttcaactcacagagtttaacctttcttttcatagagcagttaggaaacactctgtttgtaaagtctgcatgtggatattcagacctccttgaggccttctttggaaacgggatttcttcatattatgctagacagaggaattctcagtaacttccttgtgttgtgtgtattcaactcacagagttgaacgatgctttacacagagcagacttgaaacactctttttgtggaatttgcaagtggagatttcagccgctttgaggtcaatggtagaataggaagtatcttcctatagaaactagacagaatgattctcagaaactactttgtgatgtgtgcgttcaactcacagagtttaacctttcttttcatagagcagttaggaaacactctgtttgtaaagtctgcaagtggatattcagacctccttgaggccttctttggaaacgggatttcttcatattatgctagacagaagaatccccagtaacttcccttgtgttgtgtgtgttcaactcacagagttgaactttgatttacacagagcagatttgaaacactctttttgtggaatttgcaagtggagatttcaagcgctttggggccaaaggcagaaaaggaaatatcttcgtataaaaactagacagaatcattctcagaaactgctctgcgatgtgtgcgttcaattctcagagtttaacttttcttttcattcagcagtttggaaacactctgtttgtaaagtctgcacgtggatattttgaccacttagaggccttcgttggaaacgggtttttttcttgtaaggctagacagaagaattcctagtaacttccttgtgttgtgtacattcaactcacagagttgaacgttcccttagacagagcagatttgaaacactctttttgtgcaattggcaagtggtgatttcagccgctttgaggtcaatggtataaaaggaaatatcttcgtattaaaactagacagaatcattcccacaaactgcgttgtgatgtgttcgttcaactcacagagtttaacctttctgttcatagagcagttaggaaacactttgtttgtaaagtctgtaagtggatattctgacatcttgtggccttcgttggaaacgggatttcttcatattctgctagacagaagaattctcagtaacttccttgtgttgtgtgtattcaactcacagagttgaacgatcctttacacagagcagacttgaaacacactttttgtggaatttgcaagtggagatttcagccgttttgaggtcaatggtagaaaaggaaatatcttcgtataaagactagacagaatgattctcagaaactcctttgtgatgtgtgtgttcaactcacaaagtttaagctttcttttcatagagcagttagtaaacactctgtttataaagtctgcaagtggatattcagacccctttgaggccttcgttggaaaccggatttcttcatattatgctagacagaagaattcccagtaacttccttgtgttgtgtgtgttcaactcacagagttgaactttcatttacacagagcagatttgaaacactctttttgtggaatttgcaagtggagatttcaagcgctttgaggctaaaggcagaaaaggaaatatcttcgtataaaaactagacagaatcattctcagaaactgctctgcgatgtgtgcgttcaactctcagagtttaacttttcttttcattcagcagtttggaaacactctgtttgtaaagtctgcacgtggatattttgaccacttagaggccttcgttggaaacgggtttttttcctgtaagtctagacagaagaattcccagtaacttccttgtgttgtgtgcattcaactcacagagttgaacgttcccttagacagagcagatttgaaacactctatttgtgcaatttgcaagtgtagttttcaagctctttatggtcaacggcagaaaaggaaatatcttcgtttcaaaactagacagaatcattcccacaaactgcgttgtgatgtgttcgttcaactcacagagtttaacctttctgttcatagagcagttaggaaacactctgtttgtaaagtctgtaagtggatattctgacatcttatggccttcgttggaaacgggatttcttcatattctgctagacagaagaattctcaggaacttccttgtgttgtgtgtattcaactcacagagttgaacgatcctttacacagagcagacttgaaacactctttttgtggaatttgcaagtggagatttcagccgctttgagttcaatggtagaataggaaatatcttcctatagaaactacacagaatgattctcagaaactcctttgtgatgtgtgtgttcaactcacagagtttaacctttcttttcatagagcagttaggaaacactctgtttgtaaagtctgcatgtggatattttgacctctttgaggccttcgttggaaacgggttttttcatgtaaggatagacagaagaattcccagtaacttccttgggttgtgtgtgttcaactcacagagttgaactttcatttacacagagcagatttgaaaaactctttttgtggaatttgcaaatggagatttcaagcgctttgaggccaaaggcagaaaaggaaatatcttcgtataaaaactagacagaatcattctcagaaactgctctgtgatgtgtgcgttgaactctcagagtttaacttttcttttcattcagcagtttggaaacactctgtttgtaaagtctgcacgtggataatttgaccacttagaggccttcgttggaaacgggtttttttcatgtaaggctagagagaagaattcccagtaacttccttgtgttgtgtacattcaactcacagagttgaacgttcccttagacagagcagatttgaaatactctttttgtgcaattggcaagtggagatttcaagcgctttaaggtcaatggcagaaaaggaaatatcttcgtttcaaaactagacagaatcattcccacaaactgcgttgtgatgtgttcgttcaactcacagagtttaacctttctgttcatagagcagttaggaaacactctgtttgtaaagtctgtaagtggatattcagacctctttgaggccttcgttggaaacgggatttcttcatattctgctagacagaataattctcagtaacttccttgtgttgtgtgtattcaactcacagagttgaaggatcctttacagagagcaggcttgaaacactctttttgtggaatttgcaagtggaggtttcagccgctttgaggtcaatagtagaaaaggaaatatcttcctagaaaaactagacagaatgattctcagaatctcctttgtgatgtgtgcgttcaactcacagagtttaacctttcttttcatagagcagttaggaaacactctgtttgtaaagtctgcaagtggatattctgacctctttgaggccttcgttggaaacgggttttttcatataagactagacagaagaattctcagtaacttccttgtgttgtgtgtattcaactcacagagttgaacgatcctttacacagagcagacttgaaacactctttttgtggaatttgcaagtggagatttcagccgctttgaggtcaatggtagaaaaggaaatatcttcgtatatagactagacagaatgattctcagaaactcctttgtgatgtgtgtgttcaactcacagcagtttaacctttcttttcatagagcagttagtaaacactctgtttataaagtctgcaagtggatattcagacccctttgaggccttcgttggaaacgggaattcttcatattatgctagacagaagaattcccagtaactttccttgtgttgtgtgtgttcaactcacagagttgaactttcatttacacagagaagatttgaaacactctttttgtggaatttgcaagtggagatttcaagcgctttgaggccaaaggcagaaaaggaaatatcttcgtttcaaaactagacagaatcattctcagaagctgctgcgtgatgtgtgcgttcaactctcagagtttaacttttcttttcattcagcggtttggaaacactctgtttgtgaagtctgcacgtggatattttgaccacttagaggccttcgttggaaatgggttttttgcatgtaaggctagatagaagaattctcagtaacttccttgtgttgtgtgtattcaactcacagagttgaacgatcctttacacagagcagacttgtaacactctttttgtggaatttgcaagtggagatttcagccgctatgaagtcaaatgtagaaaaggaaatatcttcctataaaaactagacagaatcattcccacaaactgcgttgtgatgtgttcgttcaactcacagagtttaacctttctgttcatagagcagttaggaaacactctgtttgtaaagtctgtaagtggatattctgacatcttgtggccttcgttggaaacgggatttcttcatattctgctggacagaagaattctcagtaacttccttgtgttgtgtgtattcaactcacagagttgaacgatcctttacacagagcagacttgaaacgctctttttgtggaatttgcaagtggagatttcagccacgttgaggtcaatggtagaaaaggaaatatcttcgtataaaaactagacagaatgattctcagaaactcctttgtgatgtgtgctttcaactcacagagcttaacctttcttttcatagagcagttaggaaacactctgtttgtaaagtctgcaagtggatattcagacctctttgaggccttcgttggaaacgggtttttttcatataaggctagacagaagaattctcagtaacttccttgtgttgtgtgtattcaactcacagagttgaacgatcctttacacagagcagacttgaaacactctttttgtggaatttgcaagtggagatttcagccgctttgaggtcaatggtagaataggaaatatcttcctatagaagctagacagaatgattctcagaaactcctttgtgatgtgtgcgttcaactcacagagtttatcctttcttttcatagagcagttaggaaacactctgtttgtaaagtctgcatatggatattcagacatctttgaggccttcgttggaaacgggatttcttcatgttctgctagacagaagaattcccagtaacttccttgtgttgtgtgtgttcaactgacagagttgaactttcatttagacagagcagatttgaaacactctttttgtggaatttgcaattggagatttcaagcgctttgaggccaaaggcagaaaaggaaatatcttcgtataaaaactagacagaatcattctcagaaactgctgcgtgatgtgtgcgttcaactctcagactttaacttttcttttcattcagcggtttggaaacactgtgtttgtaaagtctgcacgtggatattttgaccacttagaggccttcgttggaaacgggtttttttcatgtaaggctagacagaagaattcccagtaacttccttgtgttcgtgtacattcaactcacagagttgaacgttcccttagacagagcagatttgaaacactctttttgtgcaattgacaaatggagatttcaagcgctttaaggtcaatggcagaaaaggaaatatcttcgtttcaaaactagacagaatcattctcagaaactgctctgcgatgtgtgcgttcaactctcagagtttaacttttcttttcattcagcagtttggaaacactctgtttgtaaagtctgcacgtggataacttgaccacttagaggccttcgttggaaacgggttttgttcatgtaaggctagacagaagaattctcaagtaacttccttgtgttgtgtgtattcaactcacagagttgaacgatcctttacacagagcagacttgtaacactctttttgtgtaatttgcaagtggagatttcagccgctttgaagtcaaaggtagaaaaggaaatatcttcctataaaaactagacagaatgattctcagaaactcctttgtgatgtgtgtgttcaactcacagagtttaacctttcttttcatagagcagttagaaaacactctgtttctaaagtctgcaagtggatattcagacccctttgaggccttcgttggaaacgggatttcttcatattatgctagacagaagaattcccagtaacttcccttgtgttgtgtgtgttcaactcacagagttgaactttcatttacacagagcagatttgaaacactctttttgtggaatttgcaaatggagatttcaagcgctttgaggccaaaggcagaaaaggaaatatcttcgtataaaaactagacagaatcattctcagaaactgctctgcgatgtgtgcgttcaactctcagagtttaacttttcttttcattcagaagtttggaaacactctgtttgtaaagtctgcacgtggataacttgaccagttagaggccttcgatggaaacgggtttttttcatgtaaggctagacagaagaattcccagtaacttccttgtgttgtgtacattcaactcacagagttgaactttcccttagacagagcagatttgaaacactctttttgtgcaattggcaagtggagatttcaagcgctttgaggtcaatggcagaaaaggaaatatcttcgtttcaaaactacacagaatgattctcagaaactcctttgtgatgtgtgcgttcaactcacagagtttaacctttcttttcatagaacagttaggaaacactctgtttgtaaagtctgcaagtggatattcagacctccttgaggctttcgttggaaacgggatttcttcatattctgctagaaagaagaattctcagtaacttccttgtgttgtgtgtattcaactcacagagttgaacgatcctttacacagagcagacttgaaaccctctttttgtggaatttgcaagtggagatttcagccgctttgaggtcaatggtagaataggaaatatcttcctatagaaactagacagaatgattctcataaactcctttgtgatgtgtgcgttcaactcacagtagtttaacctttcttttcatagagcagttaggaaacactctgtttgtaaagtctgcaagtcgatattcagacctctttgaggccttcgttggaaacgggatttcttcatattctgctagacagaagaattctcagaaacttcctggtgttgcgtgttttcaactcacagagttcaacgatccgttacacagagtagacttgaaaaactctttttgttgaattggccagtggagatttcagccgctttgaggtcaatggtagaaaaggaaatatcttcgtataaaaactagacagaatgattctcagaaactcctttgtgatgtgtgcgttcaactcacagagtttaacctttcttttcatagagcatttaagaaacactctggttgtaaagtctgcaagtggatattcagacctcgttgaggcctttgttggaaacgggatttcttcatattatgctagacagaagaattcccagtaacttccttgtgttgtgtgtgttcaactcacagagttgaactttcatttacacagagcagatttgaaacactctttttgtggaatttgcaagtggagatttcaagcgctttgaggccaaaggcagaaaaggaaatgtcttcgtttcaaaactagacagaatgattctcagaaactcctttgtgatgtgggcgttcaactcacagagtttaacctttcttttcatagagccgttaggaaacactctgtttgtaaattctgcacgtggatatttggacttctttgaggccttcgttggaaacgggtttttttcatgtaaggctagacggaagaattcccagtaacttccttgtgttgtgtacattcaactcacagagttgaacgttcccttagacagagcagatttgaaacactctttttgtgcaattggcaaatggagatttcaagcgctttaagttcaatggcagaaaaggaaatatcttcgtttcagaactagacagaatcattcccacaaactgcgttgtgatgtgttcgttcaactcacagagtttaacctttcttttcatagagcacttaggaaacagtctgtttgtcaattctgtaagtggatattctgacatcttgtggccttcgttggaaacgggatttcttcatattctgctagacagaagaattctcagtaacttccttgtgttgtgtgtattcatctcacagagttgaacgatcctttacacagagcagacttgaaacattctttttgtggaatttgcaagtggagatttcagccgctttgaggtcaatggtagaatgggaaatatcttcctatagaaactagacagaatgattctcagaaactcctttgtgatgtgtgcgttcaactcacacagttcaacctttcttttcatagagcagttgggaaacactctgtttgtaaagtctgcaagtggatattcagacttctttgaggccttcgttggaagcgggatttcttcatgttctgctagacagaagaattctcagtaactgcctgtgttgtgtgtattcaactcacagagttgaacgatcctttacacagagcagacttgaaacactctttttgtggaatttgcaagtggagatttcagccgctttgaggtcaatggtagaataggaaatatcttcctatagaaactagacagaatcattctcagaaactgctgcgtgatgtgtgcgttcaactctcagagtttaacttttcttttcattcatcggtttggaatcactctgtttgtaaagtctgcacgtggatattttgaccacttagaggccttcgttggaaacgggttttttcatgtaaggctagacagaagaattctcagtaacttccttttgttgtgtgtattcaactcacagagttgaacgatcctttacacagagcagatttgaaacactctttttgtgccattggcaagtggagatttcaagcgcttaaaggtcaatggcagaaaaggaaatatcttcgtttcaaaactagacagaatcattcccacaaactgcgttgtgatgtgttcgttcaactcacagagtttaacctttcttttcatagagcagttaggaaacagtctgtttgtcaattctgtaagtggatattctgacatcttgtggccttcgttggaaacgggatttcttcatattctcctagacagaagaattctcagtaacttcccttgtgttgtgtgtattcaactcacagagttgaacgatcctttacacagagcagacttgaaacactctttttgtggaatttgcaagtggagatttcagccgctttgaggtcaatggtagagtaggaaatatcttcgtataaagactagacagaatgattctcagaaactcctttgtgatgtgtgcgttcaactcacagagtttaacctttcttttcatagagcagttaggaaacactctgtttgtaatgtctgccagtggatattcagacatctttgaggctttcgttggaaacgggttttcttcatattctgctatacagaagaattctcagtaacttccttgtggtgtgtgtattcaactgacagagttgaactttcatttagagagagcagatttgaaacactgtttttgtggaatttgcaagtggagatttcaagcgctttggggccaaaggcagaaaaggaaatatcttcgtataaaaactagacagaatcattctcagaaactgctgggtgatgtgtgcgttcaactctcagagtttaacttttctttttattcagcggtttggaaacactctgtttgtaaagtctgcacatggatattttgaccacttagaggccttcgttggaaacgggtttttttcatgtaaggctagacagaagaattcccagtaacttccttgtgttgtgtacattcaactcacagagttgaacgttcccttagacagagcagatttgaaacactctttttgtgcaattggcaagtggtgatttcagccgctttgaggtcaatggtagaaaaggaaatatcttcgtataaaaactagacagaatcattcccacaaactgcgttgtgatgtgttcgttcaactcacagagtttaacctttcttttcatagagcagttaggaaacaatctgtttgtcaattctgtaagtggatattctgacatcttgtggccttcgttggaaacgggatttcttcatattctgctagacagaagaattctcagtaacttccttctgttgtgtgtattcaactcacagagttgaacgatcctttacacagagcagacttgaaacactctttttgtggaatttgcaagtggagatttcagccgctttgaggtcaatggtagaaaaggaaactatcctcttataaagactagacagaatgattctcagaaaatcttttgtgatgtgtgcgttcaactcacagagtttaacttttcttctcatagagcagttaggaaacactctgtttgtaaagtgtgcaagtggatattcagacctctttgaggccttcgttggaaacgggatttcttcatattctgctagacagaagaattctcagtaacttccttgtgttgtgtgtattcaactgacagagttgaactttcatttagagagagcagatttgaaacactgtttttgtggaatttgcaattggagatttcaagtgctttggggccaaaggcagaaaaggaaatatcttcgtataaaaactagacagaatcattctcagaaactgctgcatgatgtgttcgttcaactctcagagtttaacttttcttttcattcagcggtttggaaacactctgtttgtaaagtctgcacgtggaaattttgaccacttagaggccttcgttggaaacgggattttttcatgtaaggctagacagaagaattcccagtaacttccttgtgttgtgtgcattcaactcacagagttgaacgttcccttagacagagcagatttgaaacactctatttgtgcaatttgcaagtgtaggtttcaagcgctttaaggtcaatggcagaaaaggaaatatcttcgtttcaaaactagacagaatcattcccacaaactgcgttgtgatgtgttcgttcaactcacagagtttaacctttctgttcatagagcagttaggaaacactctgtttgtaaagtctgaaagtggatattctgacatcttgtggccttcgtttgaaacgggatttcttcatattctgctagacagaagaattctcagtaacttccttgtgttgtgtgtattcaactcacagagttgaacgatcctttacacagagcagacttgaaacactctttttgtggaatttgcaagtggagatttcagcctctttgaggtcaatggtagaataggatatatcttcctatagaaactaggcagaatgattctcagaaacttctttgtgatgtgtgcgttcaactcacagagtttaacctttcttttcatagagcagttaggaaacactctgtttgtaaactctgcaagtggatactcagacctgtttgaggccttcgttggaaacgggatttcttcatactatgctagacagaagaattcgcagtaacttccttgtgttgtgtgtgttcaactcacagagttgaactttcatttacacagagcagatttgaaacactctttttgtggaatttgcaagtggagatttcaagcgctttgaggccaaaggcagaaaaggaaatatcttcgtttgaaaactagacagaatcattctcagaaactgctgcgtgatgtgtgcgttcaactctcagagtttaacttttcttttcattcagcggtttggaaatactctgtttgtaaagtctgcacgtggatattttgaccacttagaggccttcgttggaaacgggtttttttcatgtaaggctagacagaagaattcccagtaacttccttgtgttgtgtgcattcaactcacagagttgaacgttcccttagacagagcagatttgaaacactctatttgtgcaatttgcaagtgtagatttcaagcgctttaaggtcaatgacagaaaaggaaatatcttcgtttcaaaactagacagaatgattctcagaaactcctttgtgatgtgtgcgttcaactcacagagttttacctttctgttcatagagcagttaggaaaccctctgtttgtaaagtctgcaagtggatattcagacctccttgaggccttcgttggaaacgggatttcttcatattctgctagacagaagaattctcagtaacttccttgtgttgtgtgtattcaactcacagagttgaacgatcctttgcacagagcagacttgaaacactctttttgtggaatttgcaagtggagatttcagccgctttgaggtcaatagtagaaaaggaaatatcttcgtagaaaaactagacagaatgattctcagaaactcccttgtgatgtgtgcgttcaactcacagagtttaacctttcttttcatagagcagttaggaaacactctgtttgtaaagtctgcaagtggatattcagacttccttgaggccttcgttggaaacgggatttcttcatattatgctagacagaagaattcccagtaacttccttgtgttgtgtgtgttcaactcacagagttgaactttcatttacacagaacagatttgaaacactctttttgtggaatttgcaaatggagatttcaagcgctttgaggccaaaggcagaaaaggaaatatcttcgtataaaaactagacagaatcattctcagaaactgctctgcgatgtgtgcgttcaactctcagagtttaacttttcttttcattcagcagtttggaaacactctgtttgtaaagtctgcacgtggatattttgaccacttagaggccttcgttggaaacgggttttttcctgtaaggctagacagaagaattctcagtaacttccttgtgttgtgtgtattcaactcacagagttgaacgttcccttagacagagcagatttgaaacactctatttgtgcaatttgcaagtgtagatttcaagcgctttaaggtcaatggcagaaaaggaaatatcttcgtttcaaaactagacagaatcattcccacaaactgcgttgtgatgtgttcgttcaactcacagagtttaacctttctgttcatagagcagttaggaaatactctgtttgtaaagtctgtaagtggatattctgacatcttgtggccttcgttggaaacgggatttcttcatattctgctagacagaagaattctcagtaacttccttgtgttgtgtgtattcaactcacagagttgaacgatcctttacacagagcagacttgaaacactctttttgtggaatttgcaagtggagatttcagccgctttgagttcaatggtagaaaaggaaatatcttcctatagaaactagacagaacgattctcagaaactcctttgtgatgtgtgcgttcaactcacagagtttaacctttcttttcatagagcagttaggaaacactctgtttgtaaagtctgcaagtggatattcagacctctttgaggctttcgttggaaacgggatttcttcctattctgctagacagaagaattcccagtaacttccttgtgttgtgtgtgttcaactcacagagttgaactttcatttacacagagcagatttgaaacactctttttgtggaatttgcaagtggagatttcaagcgctttgaggccaaaggcagaaaaggaaatatcgtcgtttcaaaactagacagaatgattctcagaaactcctttgtgatgtgtgcgttcaagtcacagagtttaacctttcttttcatagagcagttaggaaacactctgtttgtaaagtctgcaagtggatattcagacctctttgaggccttcgttggaaacgggtttttttcatataagggtagacagaagaattcccagtaacttccttgtgttgtgtacattcaactcacagagttgaacgttcccttagacagagcagatttgaaacactctttttgtgcaattggcaagtggtgatttcagccgatttgaggtcaattgtagaaaaggaaatatcttcgtagaaaaactagacagaatcattcccacaaactgcgttgtgatgtgttcgtccaactcacagagtttaacttttcttttcatagagcagttaggaaacagtctgtttgtaaagtctgtaagtggatattctgacctcttgtggccttcgttggaaacgggatttcttcatattctgctagacagaagaattctcagaaacttccttgtgttgtgtgttttcaactcacagagttgaacgatgctttacacagagtagacttgaaacactcttgttgtggaatttgcaagtggagatttcagcctctttgaggtcaatggtagaataggaaatatcttcctatagaaactagacagaacgattctcagaaactcctttgtaatgtgtgcgttcaactcacagagtttaacctttcttttcatagagcagttaggaaacactctgtttgtaaagtctgcaagtggatattcagacctctttgaggccttcgttggaaacgggatttcttcatattctgctagacagaagaatttccagtaacttccttgtgttgtgtgtgttcaactcacagagttgaactttcatttacacagagcagatttgaaacactctttttgtggaatttgcaaatggagatttcaagcgctttgaggccaaaggcagaaaaggaaatatcttcgtttcaaaactagacagaatcattctcagaaactgctgcgtgatgtgtgcgttcaactctcagagtttaacttttcttttcattcagcggtttggaaacactctgtttgtaaagtctgcacgtggatattttgaccacttagaggccttcgttggaaatgggattttttcatgtaaggctagacagaagaattcccagtaacttccttgtgttgtgtgcattcaactcacagagttgaacgttcccttagacagagcagatttgaaacactccatttgtgcaatttgcaagggtagatttcaagcgctttaaggtcaatggcagaaaaggaaatatcttcgtttcaaaactagacagaatcattcccacaaactgcgttgtgatgtgttcgttcaactcacagagtttaacctttctgttcatagagcagttaggaaacactctgtttgtaaagtctgtaagtggatattctgacatcttgtggccttcgttggaaatgggatttcttcatattctcctagacagaacaattctcagtaacttccttgtgttgtgtgtattcaactcacagagttgaacgatcctttacacagagcagtcttgaaacactctttttgtggaatttgcaagtggagatttctgccgctttgaggtcaatggtagaataggaaatatcttcctatagaaactagacagaatgattctcagaaactcctttgagatgtgtgtgttcaactcacagagtttaacatttcttttcatagagcagttaggaatcactctgtttgtaaagtctgcaagtggatattcagacctctttgaggccttcgttggaaacgggtttttttcatataaggctagacagaagaattcccagtaacttccttgtgttgtgtgtgttcaactcacagagttgaactttcatttacacagagcagatttgaaacactctttttgtggaatttgcaaatggagatttcaagcgctttgaggccaaagcagaaaaggaaatatcttcgtataaaaactagacagaatcattttcagaaactgctctgcgatgtgtgcgttcaactctcagagtttaacttttcttttcattcaggagtttggaaacactctgtttgtaaagtctgcacgtggataacttgaccacttagaggccttcgttggaaacgggtttttttcatgtaaggctagacagaagaattcccggtaacttccttgtgttgtgtacattcaactcacagagttgaacgttcccttagacagagcagatttgaaacactctttttgtgcaattggcaagtggagatttcaagcgctttaaggtcaatggcagaaaaggaaatatcttcgtttcaaaactcttcagaaagattctcataaactcctttgtgatgtgtgcgttcaactcacagagtttaacctttcttttcatagagcagttaggaaacactctgtttgtaaagtctgcaagtggatattcagacctctttgaggccttcgttggaaacgggatttcttcatattatgctagacagaataattctcagtaacttccttgtgttgtgtgtattcaactcacatagttgaaggatcctttacagagagcaggcttgaaacactctttttgtcgaatttgcaagtggagatttcagccgctttgaggtcaatggtagaataggaaatatcgtcttatagaaactagacagaatgattctcagaaactcctttgtgatgtgtgcgttcaactcacagagtttaacctttcttttcatagagcagttaggaaacactctgcttgtaaagtctgcaagtggatattcagacctctttgaggccttcgttggaaacgggtttttttcatataaggctagacagaagaattcccagtaacttccttgtgttgtgtgtgttcaactcacagagttgaactttcatttacacagagcagatttgaaacactctttttgtggaacttgcaaatggaggtttcaagcgctttgaggccaaaggcagaaaaggaaatatcttcgtataaaaaatagacagaatcattctcagaaactgctctgcgatgtgtgcgttcaactctcacagtttaacttttcttttcattcagcagtttggaaacactctgtttgtaaagtctgcaagtggatattttgaccacttagaggccttcgttggaaacgggtttttttcctgtaaggctagacagaagaattcccagtaacctccttgtgttgtgtacattcaactcacagagttgaacgttcccttagacagagcagatttgaaacactctttttgtgcaattggcaaatggagatttcaagcgctttaaggtcaatggcaggaaaggaaatatcttcgtttcaaaactagacagaatcattcccacaaactgcgttgtgatgtgttcgttcaactcacagagtttaacctttcttttcatagagcagttaggaaacagtctgtttgtcaattctgtaagtggatattctgacatcttgtggccttcgttggaaacgggacttcttcatattctcctagacagaataattctcagtaacttccttgtgttgtgtgtattcaactcacagagttgaaggatcctttacagagagcagacttgaaacactctttttgtggaatttgcaagtggagatttcagccgtttgaggtcaatggtagaataggaaatatcttccaatagaaactagacagaatgattctcagaaactcctttgtgatgtgtgtgttcaactcacagagtttaacctttcttttcatagagcagttaggaaacactctgtttgtaaagtctgcaagtggatattcagacctctttgaggccttcggttggaaacgggtttttttcatataaggctagacagaagaattcccagtaacttccttgtgttgtgtgtgttcaactcacagagttgaactttcatttacacagagcagatttgaaacactctttttgtggaatttgcaagtggagatttcaagcccttagaggccaaaggcagaaaaggaaatatcttcgtttgaaaactagacagaatcattctcagaaactgctctgtgatgtgtgcgttcaactctcagagtttaacttttcttttcattcagcagtttggaaacactctgtttgtaaagtctgcacgtggataatttgaccacttagaggccttcgttggaaacgggtttttttcatgtaaggctagacagaagaattcccagtaacttccttgtgttgtgtacattcaactcagagagttgaacgttcccttagacagagcagatttgaaacactctttttgtgcaattggcaagtggagatttcaagcgctttgaggtcaacggcagaaaaggaaatatcttcgtttcaaaactagacagcatcattcccacaaactgcgttgtgatgtgttcgttcaactcacagagtttaacctttgttttcatagaggagttaggaaacagtctgtttgtaaattctgtaagtggatattctgacatcttgtggccttcgttggaaacgggatttcttcatattctgctagacagaagaattctcagtaacttccttgtgttgtgtgtattcaactcacagagttgaacgatcctttacacagagcagactggtaacactctttttgtggaatttgcaagtggagatttcagccgctttgaagtcgaaggtagaaaaggaaataacttcctataaaaactagacagaatgattctcaaaaaatcctttgtgatgtgtgcgttcaactcacagagtttaacttttcttttcatagagcagttaggaaacactctgtttgtaaagtctgcaagtggatattcagacctctttgaggccttcgttggaaacgggaatttttcatattctgctagacagaagaattctcagtaacttccttctgttgtgtgtattcaactcacagagttgaacgatcctttacagagagcagacttgaaacactctttttgtggaatttgcaagtggagatttcagccgctttgaggtcaatggtagaataggaaatatcttcctatagaaactagacagaatgattctgagaaactcctttgtgatgtgtgcgttcaactcacagagtttaacctttcttttcatagagcagttagtagacactctgtttgtaaagtctgcaagtggatattcagatctctttgaggccttcgttggaaacgggatttcttcatattatgctagacagaagaattcccagtaacttccttgtgttgtgtgtgttcgactcacagagttgaactttcatttacacagagcagatttgaaacactctttttgtggaatttgcaagtggagatttcaagcgctttgaggccaaaggcagaaaaggaaatatcttcgtttcaaaactagacagaatcattctcagaaactgctctgcaatgtgtgcgttcaactctcagagtttaacttttcttttcattcagcagtttggaaacactctgtttgtaaagtctgcacgtggatattttgaccacttagaggccttcgttggaaacgggtttttttcctgtaaggctaaacagaagaattcccagtaacttccttgtgttgtgtacattcaactcacagtgttgaacgttcccttagacagagcagatttgaaacactctttttgtgcaattggcaagtggagatttcaagcgctttaaggtcaatggcagaaaaggaaatatcttcgtttcaaaactagacagaatcattcccacaaactgcgttgtgaagtgctcgttcaactcacagattttaacctttctgttcatagagcagttaggaaacactctgtttgtaaagtctgtaagtggatattctgacatcttgcggccttcgttggaaacggaatttcttcatattctgctagacagaagaattctcagtaacttccttgtgttgtgtgtattcaactcacagagatgaacgatcctttacacagagcagacttgaaacactctttttgtggaatttgcaagtggagatttcagccgctttgagttcaatggtagaataggaaatatcttcctatagaaactagacagaatgattctcagaaactcctttgtgatgtgtgcgttcaactcacagagtttaacctttcttttcatagagcagttaggaaacactctgtttataaagtctgcaggtggatattcagacctctttcaggccttcgttggaaacgggtttttttcatgtaaggctagacagaagaattcccagtaacttccttgtgttgtgtgtgtccaactcacagagttgaactttcatttacacagagcagacttgaaacactctttttgtggaatttgcaagtggagatttcaagcgctttgaggccaaaggcagaaaaggaaatatcttcgtttcaaaactagacagaatcattctcagaaactgctctgtgatgtgtgcgttcacctctcagagtttaagttttcttttcattcagcagtttggaaacactctgtttgtaaagtctgcacgtggatattttgaccacttagaggccttcgttggaaacgggtttttttcatgtaagaccagacagaagaattcccagtaacttccttttgttgtgtgcattcaactcacagagatgaacattcccttagacagagcagatttgaaacactctatttgtgtaatttgcaagtgtagatttcaagcgctttaaggtcaatggcagaaaaggaaatatcttcgtttcaaaactagacagaatcattcccacaaactgcgttgtgatgtgttcgttcaactcacagagtttaacctttctgttcatagagcagttaggaaacactctgtttgtaaagtctgtaagtggatattctgacatcttgtggccttcgttggaaacggtatttcttcatattctgctagacagaagaattctcagaatcttccttgtgttgtgtgtattcaactcacagagttgaacgatcctttacacagagcagacttgaaacactctttttgtggaatttgcaagtggagatttcagcagctttgaggtccatggtagaaaaggaaatatcttcgtataaaaactagacagaatgattctcagaaactcctttgtgatgtgtgtgttcaactcacagagtttaacctttcttttcatagagcagttagtaaacactctgtttataaagtctgcaagtggatattcagacccctttgaggccttcgttggaaacggaatttcttcatattatgctagacagaagaattctcagtaacttccttgtgttgtgtgtattcaactcacagagttgaacgatcctttacacagagcagacttgaaacactctttttgtggaatttgcaattggagatttcagccgctttgagttcaatggtagaataggaaatatcttcctatagaaactagacagaatgattctcagaaactcctttgtgatgtgtgcgttcaactcacagagttcaacctttcttttcatagagccgttgggaaacactctgtttgtaaagtctgcaagtggatattcagacctctttgaggccttcgttggaagcgggatttcttcatattcttctagacagaagaattcccagtaacttccttgtgttgtgtgtgttcaactgacagagttgaactttcatttacacagagcagatttgaaacactctttttgtggaatttgcaagtggagatttcaagcgctttgaggccaaaggcagaaaaggaaatatcttcgtataaaaactagacagaatcattctcagaagctgctctgcgatgtgtgtgttcaactctcagagtttaacttttcttttcattcagcagtttggaaacactctgtttgtaaagtctgcacgtggataatttgaccacttagaggccttcgttggaaacgggtttttttcatgtaaggttagacagaagaattcccagtaacttccttgtgttgtgtgcattcaactcacagagttgaacgatcctttacacagagcagacttgaaacactctttttgtggaatttgcaagtggagatttcagccgctttgaggtcaatggtagaataggaaatatcttcctatagaaactagacagaatcattcccacaaactgcgttgtgatgtgttcgttcatctcacagagtttaacctttcttttcatagagcagttaggaaacactctgtttgtaaattctgtaagtggatattctgacatcttgtggccttcgttggaaacgggatttcttcatactgtgctagacagaagaattctcagtaacttccttgtgttgtgtttattcaactcacagagttgaatgatcctttacacagagcagacttgaaacactctttttgtggaatctgcaagtggagatttcagccgctttgaggtcaatggtagaaaaggaaatatcttcgtataaagactagacagaacgattctcagaaactcctttgtgatgtgtgcgtacaactcacagagtttaacctttcttttcatagagcagttaggaaacactctgtttgtaaagtctgcaagtggatattcagacctctttgaggccttcgttggaaacgggatttcttcatattctgctagacagaagaattctcagtaacttccttgtgttgtgtgtattcaactcacagagttgtacgatcctttacacagagcagacttgaaacactctttttgtggaatttgcaagtggagatttcagccgctttgaggtcaatagtagaaaaggaaatatcttcgtagaaaaactatacagaatcattcccacaaactgcgttgtgatgtgttcgttcaactcacagagtttaacctttgtgttcatagagcagttaggaaacactctgtttgtaaagtctgtaagtggatattctgacatcttgtggccttcgttggaaaccggatttcttcatattctgctagacagaagaattctcagtaacttccttgtgttgtgtgtattaaactcacagggttgaacgatcctttaaacagagcagacttgaaacactctttttgtggaatttgcaagtggagatttcagccgctttgaggtcaatggtagaataggaaatatcttcctatagaaactagacagaatgattctcagaaactcctttgtgatgtgtgcgttcaacacacagagtttaacctttcttttcatagaggagttagtaaacactctgtttataaagtctgcaagtggatattcagacccctttgaggccttcgttggaaacgggatttcttcatattctgctagacagaagaattctcagtaactttccttgtgttgtgtgtattcaactgacaaagttgaactttcatttagagggagcagatttgaaacactgtttttgtggaatttgcaagtggagatttcaagcgctttggggccaaaggcagaaaaggatatatcttcgtataaaaactagacagaatcattttcagaaactgctgcgtgatgtgtgcgttcaactctcagagtttaacttttcttttcattcagcggtttggaaacactctgtttgtaaagtctgcacgtggatattttgaccacttagaggccttcgttggaaacgggtttttttcatgtaaggctagacagaagaattcccagtaacttccttgtgttgagtgcattcaactcacagagttgaacgttcccttagacagagcagatttgaaacactctatttgtgtaatttgcaagtgtagatttcaagcgctttaaggtcaatggcagaaaaggaaatatcttcgtttcaaaactagacagaatgattctcagaaactcctttgtgatgtgtgcgttcaactcacagagtttaacctttctgttcatagagcagttaggaaacactctgtttgtaaagtctgtaagtggatattctgacatcttgtggccttcgttggaaacgggatttctgcatattctgctagacagaaaaattctcagtaacttccttgtgttgtgtgtattcaactcacagagttgaacgatcctttacacagagcagacttgtaacactctttttgtggaatttgcaagtggagatttcagccgctttgaagtcaaaggtagaaaaggaaatatcttcctataaaaactagacagaatgattctcagaaactcctttgtgatgagtgtgttcaactcacagagtttaacctttcttttcatagagcagttaggaaacactctgtttgtaaagtctgcaagtggatattcagacctctttgaggccttcgttggaaacgggtttttttcatataaggctagacagaaggattcccagtaacttccttgtgttgtgtgtgttcaactcacacagttgaactttcatttacaaagagcagatttgaaacactctttttgtggaatttgcaagtggagatttcaagcgctttgaggccaaaggcagaaaaggaaatatcttcgtataaaaactagacagaatcattctcagaaactgctctgcgatgtgtgcgttcaactctcagagtttaacttttcttttcattcagtagtttggaaacactctgtttctaaagtctgcacgtggataatttgaccacttagaggccttcgttggaaacgggtttttttcatgtaaggctagacagaagaattcccagtaacttccttgtgttgtgtgcattcaactcacagagttgaacgttcccttagagcagatttgaaacactctatttgtgcaatttgcaagtgtagatttcaagcgctttaaggtcaatggcagaaaaggaaatatcttcgtttcaaaactagacagaatcattccgacaaactgcgttgtgatgtgttcgttgaactcacagagtttaacctttctgttcatagagcagttaggaaacactctgtttgtaaagtctgtaagtggatattctgacatcttgtggccttcgttggaaacgggatttcttcatattctgctggacagaataattctcagtaagtcccttgtgttgtgtgtattcaactcacagagttgaacgatcctttacacagagcagacttgaaacattctttttgtggaatttgcaactggagatttcagccgctttgaggtcaatggtagaataggaaatatcttcctatagaaactagacagaatgattctcagaaacttctttgggatgtgtgccttcaactcacagagtttaacctttcttttcatagagcagttaggaaacactctgtttgtaaagtctgcaagtggatattcagacctctttgaggccttcgttggaaacgggtttttttcatataaggctagacagaagaattcccagtaacttccttgtgatgtgtgtgttcaactcacagagttgaactttcatttacacagagcacatttgaaacactctttttgtggaatttgcaagtggagatttcaagcgctttgaggccaaaggcagaaaaggaaatatcttcgtataaaaactagacagaatcattctcagaaactgctctgcgatgtgtgcgttcaactctcagagtttaacttttcttttcattcagaagtttggaaacactctgtttgtaaagtctgcacgtggataacttgaccacttagaggccttcgttggaaacgggtttttttcatgtaaggctagacagaagaattcccagtaacttccttgtgttgtgtgcattcaactcacagagttgaacgttcccttagacagagcagatttgaaacactctatttgtgcaatttgcaagtgtagatttcaagcgctttaaggtcaatgacagaaaaggaaatatcttcgtttcaaaactagacagaatgattctcagaaactcctttgtgatgtgtgcgttcaactcacagagttctacctttcttttcatagagcagttgggaaacactctgtttgtaaagtctgcaagtggatattcagacttctttgaggccttcgttggaagcgggatttcttcatattctgctagacagaagaattctcagtaacttccttgtgttgtgtgtattcaactcacagagttgaacgatcctttacacagaacagtcttgaaacactctttttgtggaatttgcaagtggagatttcagccgctttgaggtcaatggtagaataggaaatatcttcctatagaaactagacagaataattctcagaaactgctttgtgatgtgtgcgttcaactcacagagtttaaactttcttttcatagagcagttaggaaacactctgtttataaagtcggcaagtggatattcagacctctttgaggccttcgttggaaacgggatttcttcatattctgctagacagaaaaattctcagtaacttccttgtgttgtgtgtattcaactcacagagttgaacgatcgtttacacagagcagacttgaaacactctttttgtggaatttgcaaggggagatttcagccgctttgaggtcaatagtagaaaaggaagtatcttcatatagaaattatacagaatgattctcagaaactcctttgagctgtgtgcgttcaactcacagagtttaacctttcttttcatagagcagttaggaaacactctgtttgtaaagtctgcaagtggatattcagacatctttgaggctttcgttggaaacgggatttcttcatattctgctagacagaagaattctcagtaacttccttgtgttgtgtgtattcaactcacagagttgaacgatcctttacacagagcggacttgaaacactctttttgtggaatttgcaagtggagatttcagccgcgttgaggtcaatggtataaaaggaaatatcttcgtataaaaactagacagaataattctcagaaactcctttgtgatgtgtgtgttcaactcacagagtttaacctttcttttcatagagcagttagtaaacactctgtttataaagtctgcaagtggatattcagacccctttgaggccttcgttggaaacgggatttcttcatattatgctagacagaagaattcccagtaacttccttgtgttgtgtgtgttcaactcacagagttgaacgttcatttacacagagcagatttgaaacactctttttgtggaatttgcaagtggagatttcaagcgctttgaggccaaaggcagaaaaggaaatatctccgtttcaaaactagacagaatcattctcagaaactgctctgtgatgtgtgcgttcaactctcagagtttaacttttcttttcattcagcagtttggaaacactctgtttgtaaagtctacacgtggatattttgaccacttagagaccttcgttggaaacgggtttttttcatgtaaggctagacagaagaattcccagtaacttccttgtgttgtgtgcattcaactcacagagatgaacgttcccttagacagagcagatttgaaacactctatttgtgcaatttgcaagtgtagatttcaagcactttaaggtcaatggcagaaaaggaaatatcttcgtttcaaaactagacagaatcattcccacaaactgcgttgggatgtgctcgttcaactcacagagtttaaactttctgttcatagagcagttaggaaacactctgtttgtaaagtctgtaagtggatattctgacatcttgtggccttcgttggaaacgggatttcttcatattctgctagacagaagaattctcagtaacttccttgtgttgtgtgtattcaactcacagagttgaacgatcctttacacagagcagacatgtaacactctttttgtggaatttgtaagtggagatttcagccgcgttgaggtcaatggtagaaaaggaaatatcttcgtataaaaactagacagaatgattctcagaaacttcattgtgatgtgtgcgttcaactcacagagtttaacctttcttttcatagagaagttaggaaacactctgtttgtaaactctgcaagtggatattcagacctctttgaggccttcgttggaaacgggatttcttcatactgtgctagacagaataattctcagtaacttccttgtgttgtgtgtattcaactcacagagttgaaagatcctttacagagagcaggcttgaaacactctttttgtcgaatttgcaagtggagatttctgccgctttgaggtcaatggtagaataggaaatatcttcttatagaaactagacagaatgattctcagaaactcctttgtgatgtgtgtgttcaactcacagagtttaacctttcttttcatagagcagttaggaaacactctgtttgtaatgtctgcaagtggatattgagacctctttgaggccttcgttggaaacgggtttttttcatataaggctagacagaagaattcccagtaacttccttgtgttgtgtacattcaactcacagagttgaacgttcccttagacagagcagatttgaaacactctttttgtgcaattggcaagtggagatttcaagcgctttaaggtcaacggcagaaaaggaaatatcttcgtttcaaaactagacagaatcattcccacaaactgcgttgtgatgtgttcgttcaactcacagagtttaacctttctgttcatagagcagttaggaaacactctctttgtaaagtctgtaagtggatattctgacatcttgtggccttcgttggaaacgggatttcttcatattctgctagacagaagaattctcagtaacttccttgtgttgtgtgtattcaactcacagagttgaacgatcctttacacagagcagacttgaaacattctttttgtggaatttgcaagtggagatttcagccgctttgaggtcaatggtagaataggaaatatcttcctatagaaactagacaggaacgattctcagaaactcctttgtgatgtgtgcgttcaactcacagagtttaacctttcttttcatagagcagttaggaaacactctgtttgtaatgtctgcaagtggattttcagacctccttgaggccttcgttggaaacgggatttcttcctattctgctagacagaagaattctcagaaacttccttgtgtagtgtatattcaactcacagagttgaacgatcctttacacagagcagacttgaaacactctttttgtggattttgcaagtggagatttcaagcgcttttggggccaaaggcagaaaaggaaatatcttcatataaaaactagacagaatcattctcagaaactgctctgtgatgtgtgcgttcaactctcagagtttaacttttcttttcattcagcagtttggaaacactctgtttgtaaagtctgcacgtggatattttgaccacttagaggccttcgttggaaacgggttttcttcatgtaaggctagacagaagaattcccagtaacttccttgtgttgtgtgcattcaactcacagagttgaacgttcccttagacggagcagatttgaaacactctatttgtgcaatttgcaagtgtagatttcaagcgctttaaggtcaatggcagaaaaggaaatatcttcgtttcaaaactagagagaatcattcccacaaactgcgttgtgatgtgttcgtacaactcacagagtttaacctttctgttcatagagcagttaggaaacactctgtttgtaaagtctgtaagtggatattcagacatcttgtggccttcgttggaaacgggatttcttcatattctgctagacagaagaattctcagtaacttccttgtgttgtgtttattcaactcacagagttgaatgatcctttacgcagagcagacttgaaacactctttttgtggaatttgcaagtggagatttcagccgctttgaggtcaatggtagaaaagtaaatatcttcgtataaagactagacagaatgattctcagaaactcctttgtgatgtgtgcattcaactcacagagtttaacctttctgttcatagagcagttaggaaacactctgtttgtaaagtctgcaagtggatattcagacctccttgaggccttcgttggaaacgggatttcttcatattctgctagacagaagaattcccagtaacttccttgtgttgtgtgtgttcaactcacagagttgaactttcatttacacagagcagatttgaaacactctttttgtggaatatgcaagtggagatttcaagcgcttttaggccaaaggcagaaaaggaaatatcttcgtttcaaaactagacagaatgattctcagaaactgctctgcgatgtgtgcgttcaactctcagagtgtaacttttcttttcattcagcagtttggaaacactctgtttgtaaagtctgcacgtggatattttgaccacttagaggccttcgttggaaacgggtttttttcctgtaaggctagacagaagaattcccagtaacttccttgtgttgtgtacattcaactcacagagttgaacgttcccttagacagagcagatttgaaacactctttttgtgcaattggcaaatggagatttcaagcgctttaagttcaatggcagaaaaggaaatatcttcgtttcaaaactggacagaatcattcccacaaactgcgttgtgatgtgttcgttcaactcacagagtttaacctttcttttcatagagcagttaggaaacagtctgtttgtcaattctgtaagtggatgttctgacatcttgtggccttcgttggaaacgggatttcttcatattctgctagacagaagaattctcagtaacttccttgtgttgtgtgtatttaactcacagagttgaacgatcctttacacagagcagacttgaaacactctttttgtggaatttgcaagtggagatttcagccgctttgaggtcaatggtagaataggaaatatcttcgtataaaaactagacagaatgattctcagaaactcctttgtgatgtgtgcgttcaactcacagagtttaacctttcttttcatagagcagttaggaaacactctgtttgtaaagtctgcaagtggatattcagacctccttgaggccttcgttggaaacgggatttctacatattatgctagacagaagaattctcagtaacttccttgtgttgtgtgtattcaactcacagagttgaacgatcctttacacagagcagacttgaaacactctttttgtggaatttgcaagtggagatttctgcctctttgaggtcaatggtagaatacgaaatatcttcctatagaaactagacagaatcattctcagaaactgctgcatgatgcgtgcgttcaactctcaaagtttaacttttcttttcattcagcggtttggaaacactctgtttgtaaagtctgcacgtggatattttgaccacttagaggccttcgttggaaacgggtttttttcatgtaaggctagacagaagaattcccagtaatttccttgtgttgtgtgcattcaactcacagagttgaacgttcccttagacagagcagatttgaaacactctatttgtgcaatttgcaagtgtagatttcaagcgctttaaggtcaatggcagaaaaggaaatatcttcgtttcaaaactagacagaatcattcccacaaactgcgttgtgatgtgttcgttcaactcacagagtttaacctttctgttcatagagcagttaggaaacactctgtttgtaaagcctgtaagtggatattctgacatcttgtggccttcgttggaaacgggatttcttcatattctgctagacagaagaattctcagtaacttccttgtgttgtgtgtattcaactcacagagttgaacgatcctttacacagagcagacttgaaacactctttttgtgtaatttgcaagtggagatttcagacgatttgaggtcaatggtagaaaaggaaatatcttcgtataaagactagacagaatgattctcagaaactcctttgtgatgtgtgtgttcaactcacaaagtttaacctttcttttcatagagcagttaggaaacactctgtttgtaaagtctgcaagtggatattcagacctctttgaggccttcgttggaaacgggtttttttcatataaggctagacagaagaattcccagtaacttccttgtgttgtgtgtgttcaactcacagagttgaactttcatttacacagagcagatttgaaacactctttttgtggaatttgcaaatggagatttcaagcgctttgaggtcaaaggcagaaaaggaaatatcttcgtataaaaactagacagaatgattctcagaaactgctctgcgatgtgtgcgttcaactctcagagtgtatcttttcttttcattcagcagtttggaaacactctgtttataaagtctgcacgtggatattttgaccacttagaggccttcgttggaaacgggattttttcatgtaaggctagaccgaagaattcccagtaacttccttgtgttgtgtgcattcaactcacagagttgaacgttcccttagacagagcagatttgaaacactctatttgtgcaatttgcaagtgtagatttcaagcgctttaaggtcaatggcagaaaagggaatatcttcgtttcaaaactagacagaatcattcccacaaactgcgttgtgatgtgttcgttcaactcacagagtttaacctttctgttcatagagcagttaggaaacactctgtttgtaaagtctgtaagtggatattctgacctcttgtggccttcgttggaaacgggatttcttcatattctgctagacagaagaattctaagtaacttccttgtgttgtgtgtattcaactcacagagttgaacgatcctttacagagagcagacttgaaacactctttttgtggaatttgcaagtggagatttcagccgctttgaggtcaatggtagaataggaaatatcttcctatagaaactagacagaatgattctcagaaacttcattgtgatgtgtgcgttcaactcacagagtttaacctttcttttcatagagcagttaggaaacactctgtttgtaaactctgcaagtggatattcagacctctttgaggccttcgttggaaacgggatttcttcatactgtgctagacagaagaattctcagtaacttccttgtgttgtgtgtattcaactcacagagttgaacgatcctttacacagagcagacttgtaacactctttttgtggaatttgcaagtggagatttcagccgctttgaatcaaaggtagaaaaggaaatatcttcctataaaaactagacagaatgattctcagaaactccttcgtgatgtgtgcgttcaactcacagagtttaacctttcttttcatagagcagttaggaaacactctgtttgtaaagtctgcaagtggatattgagacatctttgaggccttcgttggaaacgggatttcttcatgttctgctagacagaagaattcccagtaacttccttgtgttgtgtgcattcaactcacagagttgaacgttcccttagacagagcagatttgaaacactctatttgtgcaatttgcaagtgtagatgtcaagcgctttaaggtcaatggcagaaaaggaaatatcttcgtttcaaaactagacagaatcattcccacaaactgcgttgtgatgtgttcgttcaactcacagagtttaacctttctgttcatagagcagttaggaaacactctatttctaaagtctgtaagtggatattctgacatcttgtggccttcgttggaaacgggatttcttcatattctgctagacagaagaattctcagtaacttccttgtgttgtgtgtattcaactcacagagttgaacgatcctttacacagagcagacttgaaacattctttttgtggaatttgcaagtggagatttcagccgctttcaggtcaatggtagaataggaaatatcttcatatagaaactagacagaatgattctcagaaactcctttgtgatgtgtgcgttcaactcacagagtttaacctttcttttcatagagcagttgggaaacactctgtttgtaaagtctgcaagtggatattcagacctccttgaggccttcgttggaaacgggatttcttcatataatgctagacagaagaattctcagtaacttccttgtgttgtgtgtattcaactcacagagttgaacgatcctttacacagagcacacttgaaacactctttttgtggaatttgcaagtggagatttcagccgctttgaggtcaatagtagaaaaggaaatatcttcgtagaaaaactagacagaatcattctcagaaactgctgcgtgatgtgtgcgttcaactctcagagtttaacttttcttttcattcagcggtttggaaacactctgtttgtaaagtctgcacgtggatattttgaccacttagaggccttctttggaaacgggttttcttcatgtaaggctagacagaagaattcccagtaacttccttgtgttgtgtgcattcaactcacagagttgaacgttcctttagacagagcagatttgaaacactctatttgtgcaatttgcaagtgtagatttcaagcgctttaaggtcaacggcagaaaaggaaatatcttcgtttcaaaactagacagaatcattcccacaaactgcgttgtgatatgttcgttcaactcacagagtttaacctttctgttcatagagcagttaggaaacactgtgtttgtaaagtctgtaagtggatattctgacatcttgtggccttcgttggaaacgggatttcttcatattgtgctagacagaagaattctcagtaacttccttgtgttgtgtgtattcaacacacagagttgaacgatcctttacacagagcagacttgaaacactctttttgtggaatttgcaagtggagatttcagccgctttgatgtcaatggtagaaaaggaaatatcttcgtataaagactagacagaatgattctcagaaactcctttgtgatgtgtgcgttcaactcacagagtttaacctttcttttcatagagcagttaggaaacactctgtttgtaaagtctgcaagtggatattcagacctctttgaggccttcgttggaaacaggtttttttcctataaggctagacagaagaattcccagtaacatccttgtgttgtgtgtgttcaactcacagagttgaactttcatttacacagatcagatttgaaagactctttttgtggaatttgcaaatggagatttcaagcgctttgaggccaaaggcagaaaaggaaatatcttcgtttcaaaactagacagaatcattccaagaaactgctctgcgatgtgtgcgttcaactctcagagtttaaatttgcttttcattcagcagtttggaaacactctgtttgtaaagtctgcacgtggataatttgaccacttagaggccttcgttggaaacgggtttttttcatgtaaggctagacagaagaattctcagtaacttccttgtgttgtgtgtattcaactcacacagttgaacgatcctttacacagagcagacttggaacactctttttgtggaatttgcaagtggagatttcagccgctttgaagtcaaaggtagaaaaggaaatatcttcctataaaaactagacagaatcattcccacaaactgcgttgtgatggtgttcgttcaactcacagagtttaacctttcttttcatagagcagttaggaaacagtctgtttggtaaattctgtaaggggatattctgacatcttgtggccttcgttggaaacgggatttcttcatattctgctagacagaacaattctcagtaacttccttgtgttgtgtgtattcaactcacagagttgaacgatcctttacacagagcagacttgaaacactctttttgtggaatttgcaagtggagatttcagccgctttgaggtcaatagtagaaaaggaaatgtcttcgtagaaaaactagacagaatgattctcagaaactcctttgtggtgtgtgcgttcaactcacagagtttaacctttcttttcatagagcagttaggaaacactctgtttgtaaagtctgcaagtggatattcagacctctttgaggccttcgttggaaacgggattttttcatataaggctagacagaataattctcagtaacttccttgtgttgtgtgtattcaactgagagagttgaacgttcatttagagagagcagatttgaaacactgtttttgtggaatttgcaattggagatttcaagcgctttagggccaaaggcagaaaaggaaatatcttcgtataaaaactagacagaatcattctcagaaactgctgcgtgatgtctgcgttcaactctcagagtttaacttttcttttcattcagcggtttggaaacactctctttgtaaagtctgcacgtggatattttgacctcttagaggccttcgttggaaacgggttttcttcatgtaaggctagacagaagaattcccagtaacttccttgtgttgtgtacattcaactcacagagttgaacgttcccttagacagagcagatttgaaagactctttttctgcaattggcaaatggagatttcaagcgctttaaggtcaatggcagaaaaggaaatatcttcgtttcaaaactagacagaatcattcccacaaactgcgttgtgatgtgttcgttcatctcacagagtttaacctttcttttcatagagcagttaggaaacagtctgtttgtaaattctgtaagtggatattctgacatcttgtggccttcgttggaaacgggatttcttcatattctgctagacagaagaattctcagaaacttcgttgtgttgtgtgttttcaactcacagagttgaacgatcctttacacagagtagacttgaaaaactctttttgtagaatttgcaagtggagatttcagccgctttgaggtcaatggtagaaaaggaaatatcttcgtataaaaactagacagaatgattctcagaaactcctttgtgatgtgtgcgttcaactcacagagttcaacctttcttttcatagagcagttgggaaacactctgtttgtaaattctgcaaatgcatattcagacttctttgaggccttcgttggaagcgggatttcttcatattctgctagacagaagaattctcagaaacttcgatgtgttgtgtgttttcaaatcacagagttcaacgatcctttacacagagtagacttgaaacactctttttgtggaattggcagggtggagatttcagccgctttgaggtcaatggtagaaaaagaaatatcttcgtataaaaactagacagaatgattctcagaaactcctttgtgatgtgtgcgttcaacgcacagagttcaacctttcttttcatagagcagttgggaaacactctgtttgtaaagtctgcaagtggatattcagacttctttgaggccttcgttggaagcgggatttcttcatattcaactagacagaagaattcccagtaacttccttgtgttgtgtacattcaactcacagagttgaacgttcccttagacagagcagatttgaaacactctttttgtgcaattggcaaatggagatttcaagcgatttaaggtcaatggcagaaaaggaaatatcttcgtttcaaaactagacagaatgattctcagaaacttcattgtgatgtgtgcgttcaactcacagagtttaacctttcttttcatagagcagttaggaaacagtctgtttgtaaattctgtaagtggatattctgacatcttgtggccttcgttggaaacgggatttcttcatattctgctagacagaagaattatcagtaacttccttgtgttgtgtgtattcaactcacagagttgaacgatcctttacacagagcagacttgaaacactctttttgtggaatttgcaagtggagatttcagccgctttgaggtcaatggtagaataggaaatatcttcctatagaaaatagacagaatgattctcagaaactcctttgtgatgtgtgcgttcaactcacagagtttaacctttctgttcatagagcagttaggaaacactctgtttgtaaagtctgcaagtggatattcagacctctttgaggccttcgttggaaacgggatttcttcatattctgctagacagaataattctcagtaacttccttgtgttgtgtgtattcaactcacagagttgaactttcatttagagagagcagatttgaaacactgtttttgtggaatttgcaagtggagatttcagccgctttgaggtcaatggtagaataggaaatatcttcctatagaaactagacagaatcattctcagaaactactctgcgatgtgtgcgttcaactctcagagtttaacttttcttttcattcagcagtttggaaacactctgtttgtaaagtctgcacgtggatattttgaccacttagaggccttcgttggaaacgggtttctttcctgtaaggctagacagaagaattcccagtaacttccttgtgttgtgtgcattcaactcacagagttgaacgttcccttagacagagcagatttgaaacactctatttgtgcaatttgcaagtgtagattccaagcgctttaaggtcaatggcagaaaaggaaatatcttcgtttcaaaactagacagaatcattcccacaaactgcgttgtgatgtgttcgttcaactcacagagtttaacctttctgttcatagagcatttaggaaacactctgtttgtaaagtctgcaagtggatattcagacctccttgaggccttcgttggaaacgggatttcttcatattctgctagacagaagaattctcagtaacttccttgtgttgtgtgtattcaactcacagagttgaacgatcctttacacagagcagacttgaaacactctttttgtgaaatttgcaagtggagatttcagccgttttgaggtcaatggtagaaaaggaaatatcttcgtataaagactagacagaatgattctcagaaactcctttgtgatgtgtgcgttcaactcacagagttcaacctttcttttcatagagcagttgggaaacactctgtttgtaaagtctgcaagtggatattcagacctctttgaggccttctttggaagcgggatttcttcatattcttctagacagaagaattctcagtaacttccttgtgttgtgtgtattcaactcacagagttgaacgatcctttacacagagtagacttgaaacactctttttgtggaatttgcaagtggagatttcagccgctttgaggtcaatggtagaataggaaatatcttcctatagaaaccagacagaatgattctcagaaacttctttgcgatgtgtgcgttcaactcacagagtttaacctttcttttcatagagcagttaggaaacactctgtttgtaaactctgcaagtggatattcagacctctttgaggccttcgttggaaacgggatttcttcatactatgctagacagaagaattcccagtaacttccttctgttgtgtgtgttcaactcacagagttgaactttcatttacacagagtagatttgaaacactctttttgtggaatttgcaagtggagatttcaagcgctttgaggccaaaggcagaaaaggaaatatcttcgtttcaaaactagacagaatcattctcagaaactgctctgcgatgtgtgccttcaactctcagagtttaacttttcttttcattcagcagtttggaaacactctgtttgtaaagtctgcacgtggatattttgaccacttagaggccttcgttggaaacgggtttttttcctgtaaggctagacagaagaattcccagtaacttccttgtgttgtgtacattcaactcacagagttgaacgttcccttagacagagcagatttgaaacactctttttgtgcaattggcaaatggagatttcaagcgctttaagatcaatggcagaaaaggaaatatcttcgtttcaaaactagacagaatcattccaacaaactgcgttgtgatgtgttcgttcaactcacagagtttaacctttctgttcatagagcagttaggaaacactctgtttgtaaagtctgtaagtggatattctgacatcttgtggccttcgttggaaacgggatttcttcatattctgctagacagaagaattctcagaaacttcgttctgttgtgtgttttcaactcacagagttcaacgatcctttacagagagtagacttgaaacactctttttgtggaattggcagggtggagatttcagccgctttgaggtcaatggtagaaaaggaaatatcttcgtataaaaactagacagaatgattctcagaaactcctttgtgatgtgtgcgttcaactcacagtgtttaacctttcttttcctagagtagttaggaaacactctgtttttaaagtctgcaagtggatattcagacctctttgaggccttcgttggaaacgggatttcttcatattatgctagacagaagaattctcagtaacttccttgtgttgtgtgtattcaactgacagagttgaactttcatttagagatagcagatttgaaacactgtttttgtggaatttgcaagtggagatttcaagcgctttggggccaaaggaagaaaaggaaatatcttcgtataaaaactagacagaatcattctcagaaactgctgcgtgatgtgtgcgttcaactctcagagtttaacttttcttttcattcagcggtttggaaacactctgtttgtaaagtctgcacttggatattttgaccacttagaggccttcgttggaaacgggttttttttcatgtaaggctagacagaagaattcccagtaacttccttgtgttgtgtgcattcaactcacagagttgaacgttcccttagacagagcagatttgaaacactctatttgtgcaatttgcaagtgtagatttcaagcgctttaaggtcaatggcagaaaaggaaatttcttcgtttcaaaactagacagaaatcattcccacaaactgcgttgtgatgtgttcgttcaactcacagaagtttaacctttcttttcatagagcagttaggaaacagtctgtttgtaaattctgtaagtggatattctgacatcttgtggccttcgttggaaacgggatttcttcatattctgctagacagaagaattctcagaatcttcccttgtgttgtgtgtattcaactcacagagttgaacgatcctttacacagagcagacttgaaacactctttttgtggaatttgcaagtggagatttcagccgctttgaagtcaaaggtagaaaaggaaatatcttcctataaaaactagacagagtgattctcagaaactcctttgtgatgtctgcgttcaactcacagagtttaacctttcttttcatagagcagttaggaaacactctgtttgtaaagtctgcaagtggatattcagacctccttgaggccttcgttggaaacgggatttcttcatattatgctagacagaagaattctcagtaacttccttgtgttgtgtttattcaactgacagagttgaactttcatttagagagagcagatttgaaacactgtttttgtggaatttgcaagtggagatttcaagcgctttggggccaaaggcagaaaaggaaatatcttcgtataaaaactagacagaaatcattctcagaaactgctctgtgatgtgtgcgttcaactctcagagtttaacttttcttttcattcagcagtttggaaacactctgtttgtaaagtctgcacgtgcataatttgaccacttagaggtcttcgatggaaacgggtttttttcatgtaaggctagacagaagaattctcagtaacttccttgtgttgtgtgtattcaactcacagagttgaacgatcctttacacagagcagtcttgtaacactctttttgtggaatttgcaagtggagatttcagccgctttgaagtcaaaggtagaaaaggaaatatcttcctataaaaactagacagaatcattcccacaaactgcgttgtgatgtgtttgttcaactcacagagtttaacctttcttttcatagagcagttaggaaacagtctgtttgtaaattctgtaagtggatattctgacatcttgtggccttcgttggaaacgggatttcttcatattctgctagacagaagaattctcagaaacttccttgggttgtgtgtattcaactcacagagttgaacgatcgtttacacagagcagacttgaaacactctttttgtggaatttgcaagtggagatttcagccgctttgaggtcaatggtaggaaaggaaatatcttcgtataaaaattagacagaatgattctcagaaactcctttgtgatgtgtgcgttcaactcacagagtttaacctttcgtttcatagagcagttaggaaacactctgtttgtaaagtctgcaagtggatattaagacctctttgaggccttcgttggaaacgggatttcttcatattctgctagacagaagaattctcagtaacttccttgtgttgtgtgtattcaactgacagagttgaactttcatttagagagagcagatttgaaacactgtttttgtggaatttgcaagtggagatttccagcgctttggggccaaaggcagaaaaggaaatatcttcgtataaaaactagacagaatcattctcagaaactgctctgcgatgtgtgcgttcaactctcagagtttaacttttcttttcattcagcagtttggaaacactctgtttgtaaagtctgcacgtggataacttgaccacttagaggccttcgttggaaacgggtttttttaatgtaaggctagacagaagaattcccagtaacttccttgtgttgtgtacattcaactcacagagttgaacgttcccttagacagagcagatttgaaactctctttttgtgcaattggcaagtggagatttcaagcgctttaaggtcaatggcagaaaaggaaatatcttcgtttcaaaactagacagaatcattcccacaaactgcgttgtgatgtgttcgttcgactcacagagtttaacctttctgttcatagagcagttaggaaacactctgtttgtaaagtctgcaagtggatattcagacctccttgaggccttcgttggaaacgggatttcttcattttctggtagacagaagagttctcagtaacttccttgtgttgtgtgtattcaactcacagagttgaacgatcctttacacagagcagacttgaaacactctttttgtggaatttgcaagtggagatttcagccgcttttaggtcaatagtagaaaaggaaatatcttcgtagaaaaactagacagaatgattctcagaaactcctttgtgatgtgtgcgttcaactcacagagtttaacttttcttttcatagagcagttaggaaacactctatttgtaaagtctgcaagtggatattcagacctctttgaggccttcgttggaaacgggatttcttcatattatgctagacagaagaattttcagtaacttccttgtgttgtgtgtagtcaactgacagagttgaactctcatttagacagagcagatttgaaacactctttttgtggaatttgcaagcggagattacaagcgctttgaggccaaaggcagaaaaggaaatatcttcgtataaaaactagacagaatcattctcagaaactgctctgcgatgtgtgcgttcaactctcagagtttaacttttcttttcattcagcagtttggaaacactctgtttgtaatgtctgcacgtggatattttgaccacttagaggccttcgttgcaaacgggtttttttcctgtaaggctagacagaagaattcccagtaactatccttgtgttgtgtacattcaactcacaagcagttgaacgttcccttagacagagcagatttgaaacactctttttgtgcaattggcaagtggagatttcaagcgctttaaggtcaatggcagaaaaggaaacatcttcgtttcaaaactagacagaatgattctcagaaactcctttgtgatgtgtgcgttcaactcacagagtttaacctttcttttcatagagcagttaggaaacactctgcttgtaaagtctgcaagtggatattcagacctctttgaggccttcgttggaaacgggatttcttcatactgtgctagacagaagaattctcagtaacttccttgtgttgtgtgtattcaactcacagagttgaacgatcctttacacagagcggacttgaaacacactttttgtggaatttgcaagtggagatttcagccgcgttgaggtcaatggtagaaaaggaaatatcttcgtataaaaaccagacagaatgattctcagaaaatcttttgtgatgtgtgcgttcaactcacagagtttaacttttcttctcatagagcagttaggaaacactctgtttgtaaagtctgcatgtggatattcagacctctatgaggccttcgttggaaacgggatttctacatattatgctagacagaagaattctcagaaacttccttgtgttgtgtgttttcaactcacagagttgaacgatcctttacacagagcagacttgaaacactctttttgtggaatttgcaagtggagatttcagccgctttgaggtcaatggtagaataggaaatatcttcatatagaaactagacagaatgattctcagaaacttctttgtgatgtgtgcgttcaactcacagagtttaacctttcttttcatagagcagttaggaaacactctgtttgtaaactctgcaagtggatattcagacctctttgaggccttcgttggtaacgggatttcttcatactatgctagacagaagaattcccagtaacttccttgtgttgtgtgtgttcaactcacagagttgaactttcatttacacagagcagatttgaaacactctttttgtggaatttgcaagtggagatttcaagcgctttgaggccaaaggcagaaaaggaaatatctttgtttcaaaactagacagaatcattctcagaaactgctctgcgatgtgtgcgttcaagtctcagagtttaacttttcttttcattcagcagtttggaaacactctgtttgtaaagtctgcacgtggataatttgaccacttagaggccttcgttggaaacgggttttgttcatgtaaggctagacagaagaattcccagtaacttccttgtgttgtgtacattcaactcacagagttgaacgttccctttgacagagcagatttgaaacactctttttgtgcaattggcaagtggagatttcaagcgctttaaggtcaatggcagaaaaggaaatatcttcgtttcaaaactagacagaatgattctcagaaactcctttgtgatgtgtgcgttcaactcacagagttcaacctttcttttcatagagcagttgggaaacactctgtttgtaaagtctgcaagtggatattcagacttctttgaggccttcgttggaagcgggatttcttcatattctgcttgacagaagaattctcagtaacttccttgtgttgtgtgtattcaactcacagagttgaacgatcctttacacagagcatacttgaaacactcttgttgtggaatttgcaaggggagatttcagccgctttgaggtcaatggtagaataggaaacatcttcctatagaaactagacagaataattctcagaaactcctttgtgatgtgtgcgttcaactgacagagtttaacctttcttttcatagagcagttaggaaacactctgtttgtaaagtctgcaagtggatattcagacctctttgaggccttcgttggaaacgggtttttttcatataaggctagacagaagaattctcagtaacttccttgtgttgtgtgtatttaactcacagagttgaatgatcctttacacagaacagtcttgaaacactctttttgtggaatttgcaagtggagatttcagccgctttgaggtcaatggtagaataggaaatatcttcctatagaaactagacagaatgattctcagaaactcgtttgtgatgtgtgtgttcaactcacagagtttaacctttcttttcatagagcagttagtaaacactctgtttataaagtctgcaagtggatattcagacccctttgaggccttcgttggaaacgggatttcttcatattatgctagacagaagaattctcagtaacttccttgtgttgtgtgtattcaactgacagagttgaactttcatttggagagagcagatttgaaacactgtttttgtggaatttgcaagtggagatttcaagcgctttggggccaaaggcagaaaaggaaatatcttcgtataaaaactagacagaatcattctcagaaactgctgcgtgatgtgtgcgttcaactctcagagtttaacttttcttttcattcagccgtttggaaacactccgtttgtaaagtctgcacgtggaaattttgaccacttagaggccttcgttggaaacgggtttttttcatgtaaggctagacagaagaattcccagtaacttccttgtgttgtgtacattcaactcacagaattgaacgttcccttagacagagcagatttgaaacactctttttgtgcaattggcaagtggagatttcaagcgctttaaggtcaatggcagaaaaggaaatatcttcgtttcaaaactagacagaacgattctcagaaactcctttgtgatgtgtgcgttcaactcacagagtttaacctttcttctcatagagcagttaggaaacactctgtttgtaaagtctgcaagtggatattcagacatcttcgaggctttcgttggaaacgggatttcttcatattctgctatacagaagaattctcagtaacttccttgtgttgtgtgtattcaaatcacagagttgaatgatcctttacacagaacagacttgaaacactctttttgtggaatttgcaagtggagatttcagccgctttgaggtcaatggtagaataggaaatatcttcctatagaaactagacagaatgattctcagaaactcctttgtgatgtgtgcgttcaactcacagagtttaacctttcttttcatagagcagttaggaaacactctgtttgtaaagtctgcaagtggatattcagacctccttgaggccttcgttggaaacgggatttcttcctattctgctagacagaagaattcccagtaacttccttgtgttgtgtgtgttcaactcacagagttgaactttcatttacacagagcagatttgaaacactctttttgtggaatttgcaaatggagattttaagcgctttgaggccaaaggcagaaaaggaaatatcttcgtataaaaactagacagaatcattctcagaaactgctctgcgatgtgtgcgttcaactctcagagtttaacttttcttttcattcagaagtttggaaacactctgtttgtaaagtctgcacgtggatattttgaccatttagaggccttcgttggaaacgggtttttttcttgtaaggctagacagaagaattcccagtaacttccttgtgttgtgtagattcaactcacagagttgaacgttcccttagacagagcagatttgaaacactctttttgtgcaatcggcaagtggagatttcaagcgctttaaggtcaatggcagaaaaggaaatatcttcgtttcaaaactagacagaatcattcccacaaacggcgttgtgatgtgttcgttcaactcacagagtttaacctttctgttcatagagcagttaggaaacactctgtttgtaaagtctgcaagtggatattcagacctccttgaggccttcgttggaaacgggatttcttcatattctgctagacagaagaattctcagtaacttccttgtgttgtgtgtattcaactcacacagttgaacgatcctttacacagagcagacttgaaacactctttttgtggaatttgcaagtggagatttcagccgctttgaggtcaatggttgaaaaggaaactatcttcatataaagactagacagaatgattctcagaaactcctttgtgatgtgtgtgttcaactcacagagtttaacctttcttttcatagagcagttaggaaacactctgtttataaagtctgcaagtggatattcagacccctttgaggtcttcgttggaaacgggatttcttcatattatgctagacagaagaattctcagtaacttccttgtgttgtgtgtattcaactcacagagttgaaggatcctttacagagagcaggcttgaaacactctttttgtcgaatttgcaagtggagatttcagccgctttgaggtcaatggtagaataggaaatatcttcttatacaaactagacagaatgattctcagaaactcctttgtgatgtgtgcgttcaactcacagagtttaacctttcttttcatagagcagttaggaaacactctgtttgtaaagtctgcaagtggatattgagacctcctttaggacttcgttggaaacgggatttcttcatattatgctagacagaagaattcccagtaacttctttgtgttgtgtacattctactcacagagttgaacgttcccttagacagagcagatttgaaacactctttttgtgcaattggcaagtgttgatttcaaccgctttgaggtcaatggtagaaaaggaaatatcttcgtataaaaactagacagaatcattcccgcaaactgcgttgtgatgtgttcgttcaactcacagagtttaacctttcttttcatagagcagttaggaaacagtctgtttgaaaattctgtaagtggatattctgacatcttgtggccttcgttggaaacgggatttcttcatattctgctagacagaagaattctcagtaacttccttgtgttgtgtgtattcaactcacagagttgaacgatcctttacacagagcagacttgaaacaccctttttgtggaatttgcaagtggagatttcagccgcgttgaggtcaatggtagaaaaggaaatatcttcgtataaaaactggacagaaggattctcagaaactcctttgtgatgtgtgcattcaactcacagagtttaacctttcttttcatagagcagttaggaaacactctgtttgtaaagtctgcaagtggatattcagacctctttgaggccttcgttggaaacgggatttcttcatattctgctagacagaagaattctcagtaacttccttgtgttgtgtgtattcaactcacagagttgaacgatccttttcacagagcagacttgaaacactctttttgtggaatttgcaagtggagatttcagccgctttgaggtcaatggtagaataggaaatatcttcgtagaaaaactagacagaatgattctgagaaactcctttgtgatgtgtgcgttcaactcacacagtttaacctttcttttcatatagcagttaggaaacactctgtttgtaaagtctgcaagtggatattcagacctccttgaggccttcgttggaaacgggatttcttcaaattctgctagacagaagaattcccagtaacttccttgtgttgtgtacattcaactcacagagttgaacgtttccttagacagagcagatttgaaacactctttttgtgcaattggcaagtggtgatttcagccgctttgtggtcaatggtagaaaaggaaatatcttcatataaaaactagacagaatcattcccacaaactgcgttgtgatgttttcgttcaactcacagggtttaacctttcttttcatagagcagttaggaaacactctgtttgtaaagtctctaagtggatatactgacatcttgttgccttctttggaaacgggatttcttcatattctgctatacagaagaattctcagtaacttccttgtgttgtgtgtattcaactcacagagttaaatgatcctttacacagagcagacttgaaaaactctttttgtggaatttgcaagtggagatttcagccgctttgtggtcaatggtagaataggaaatatcttcctatagaaactagacagaatgattctcaggaactcctatgtgatgtgtgcgttcaactcacagagtttaacttttcttttcatagagcagttaggaaacactctgtttgtaaagtctgcaagtggatattcagacctcttgaggccttcgttggaaacgggatttcttcatattatgctagacagaagaattctcagtaacttaccttgtgttgtgtgtattcaactgacagagttgaactttcatttagagagagcagatttgaaacactgtttttgtggaatttgcaagtggagatttcaagcgctttgcggccaaaggcagaaaaggaaatatcttcgtataaaaactagacagaatcattctcagaaactgctgcgtgatgtatgcgttcaactctcagagtttaacttttcttttcattcagcggtttggaaacactctgttgtaaagtctgcacgtggatattttgaccacttagaggccttcgttggaaaggggtttttttcatgtaaggctagacagaagaattcccagtaacttccttgtgttgtgtgcattcaactcacagagttgaacgttcccttagacagagcagatttgaaacactctatttgtgcaatttgcaagtgtagatttcaagcgctttaaggtcaatggcacaaaaggaaatatcttcgtttcaaaactagacagaatcattcccacaaactgcgttgtgatgtgttcgttcaactcacagagtttaacctttctgttcatagagcagttaggaaacactctgtttgtaaagtctgcaagtggatattcagacctccttgaggctttctttggaaacgggatttcttcatattctggtagacagaagaattctcagaaacttccttgtgttctgtgtattcaactcacagagatgaacgatcctttacacagagcagatttgacacactctttttgtggaatttgcaagtggagatttcagccgctttgaggtccatggtagaaaaggaaatatcttcgtataaaaactagacagaatgattctcagaaactcctttgtgatgtgtgcgttcaactcacagagtttaacttttctgttcatagagcagttaggaaacactctgtttgtaaagtctgcaagtggatattcagacctctttgaggccttcgttggaaacgggatttcttcatattattctagacagaagaattcccagtaacttccttgtgttgtgtgtgttcaactcacagagttaaacttccatttacacagagcagatttgaaacactctttttgtggaatttgcaagtggagatttcaagcgctttgaggccaaaggcagaaaaggaaatatcttcgtttcaaaactagacagaaatcattctcagaaactgctctgcgatgtgtgcgttcaactctcagcagtttaacttttcttttcattcagcagtttggaaacactctgtttttaaagtctgcacgtggataatttgaccacttagaggccttcgttggaaacgggtttttttcatgtaaggctagacagaagaattctcagtaacttccttgtgttgtgtgtattcacctcacagagttgaacgatcctttacacagagcagacttgtaacactctttttgtggaatttgcaagtggagatttcagccgctttgaagtcaaaggcagaaaaggaaatatcttcctataaaaactagacagaatcattcccacaaactgcgttgtgatgtgttcgttcaactcacagagtttaacctttctattcatagagcagttaggaaacactctgtttgtaaagtctgcaagtggatattcagaccaccttgaggccttcgttggaaacgggatttcttgatattctgctagacagaagatttctcagtaacttccttgtgttgtgtgtattcaactcacagagttgaacgatcctttacacagagcagacttgaaacactctttttgtggaatttgcaagtggagatttcagccgctttgaggtcaatggtagaataggaaatatcttcgtatagaaactagacagaatgattctcagaaactcctttgtgatgtgtgcgttcaactcacagagttcaacctttcttttcatagagcagttgggaaacactctgtttgtaaagtctgcaagtggatattcagacttctttgaggccttcgttggaagcgggatttcttcatattctgctagaaagaagaattcccagtaacttcccttgtgttgtgtgtgttcaactcacagagttgaactttcatttacacagagcagatttgaaacactctttttgtggaatttgcaggtggagatttcaagcgctttgaggccaaaggcagaaaaggaaatatcttcgtataaaaactagacagaatcattctcagaaactgctctgcgatgtgtgcgttcaactctcagagtttaacttttcttttcattcagcagtttggaaacactctgtttgtaaagtctgcacgtggataacttgaccacttagaggccttcgttggaaacgggtttttttcctgtaaggctagacagaagaattcccagtaacttccttgtgttgtgtgcattcaactcacagagttgaacgttcccttagacagagcagatttgaaacactctatttgtgcaatttgcaagtgtagatttcaagcgctttaaggtcaatggcagaaaaggaaatatctccgtttcaaaactagacagaatcattcccacaaactgcgttgtgatgtgctcgttcaactcacagagtttaacctttctgttcatagagcagttaggaaacactctgtttgtaaagtctgtaagtggatattctgacatcttgtggccttcgttggaaacgggatttcttcatattctgctagacagaagaattctcaataacttccttgtgttgtgtgtattcaactcacagagttgaacgatcctttacacagagcagacttgaaacactctttttgtggaatttgcaagtggagatttcagccgctttgaggtcaatggtagaaaagggaatatcttcgtatcgaaactagacagaatgattctcagaaactcctttgtgatgtgtgcgttcaactcacagagtttaacctttctgttcatagagcagttaggaaacactctgtttgtaaagtctgcaagtggatattcagacctccttggggccttcgttggaaacgggatttcttcatattctgctagacagaagaattcccagtaacttccttgtgttgtgtgtgttcaaatcacagagttgaactttcatttacacagagcagatttgaaacactctttttgtggaatttgcaagtggagatttcaagcgctttgaggccaaaggcagaaaaggaaatatcttcgtttcaaaactagacagaatcattctcagaaactgctctgcgatgtgtgcgttcaactctcagagtttaacttttcttttcattcagcagtttggaaacactctgtttgtaaagtctgcacgtggataacttgaccacttagaggccttcgttggaaccgggtttttttcatgtaaggctagacagaagaattcccagtaacttccttgtgttgtgtgcattcaactcacagagttgaacgttcccttagacagagcagatttgaaacactctatttgtgcaatttgcaagtgtagatttcaagcgctttaaggtcagtggcagaaaaggaaatatcttcgtttcaaaactagacagaatcattcccacaaactgcgttgtgatgtgttcgttcaactcacagagtttaacctttcttttcatagagcagttaggaaacagtctgtttgtcaattctgtaagtggatattctgacatcttgtggccttcgttggaaacgggatttcttcatattctcctagacagaagaattctcagtaacttccttgtgttgtgtgtattcaactcacagagttgaacgatcctttacacagagcagacttgaaacactctttttgtggaatttgcaagtggagatttcagccactttgaggtcaatggtagaaaaggaaatatcttcgtagaaaaactagacagaacgattctcagaaactcctttgtgatgtgagcgttcaactcacacagtttaacctttcttttcttagagcagttaggaaacactctgtttgtaaagtctgcaagtggatattcagacctctttgaggccttcgttggaaacgggatttcttcgtattctgctagacagaagaattctcagtaacttcttggtgttgtgtgtattcaactcacagagttgaacgatgctttacacagagcagacttgaaacactctttttgtggaatttgcaagtggagatttcagccgctttgaggtccatggtagaaaaggaaatatcttcgtataaaaactagacagaatgattctcagaaactcctttgtgatgtgtgcgttcaactcacagagtttaaactttcttttcatagagcagttaggaaacactctgtttgtaaagtctgcaggtggatattcagacatcattgaggctttcgttggaaaagggatttcttcatattctgctagacagagaattcccagtaacttccttgtgttgtgtgtgttcaactcacagagttgaactttcatttacacagagcagatttgaaacactctttttgtggaatttgcaagtggagatttcaagcgctttgaggccaaaggcagaaaaggaaatatcttcgtttcaaaactagacagaatcattctcagaaactgctctgcgatgtgtgcgttcaactctcagagtttaacttttcttttcattcagcagtttggaaacactctgtttgtaaagtctgcacgtggatattttgaccacttagaggctttcgttggaaacggatttttttcctgtaaggctagacagaagaattcccagtaacttccttgtgttgtgtacattcaactcacagagttgaacgttcccttagacagagcagatttgaaacactctttttgtgcaattggcaagtggagatttcaagcgctttaaggtcaatggaagaaaaggaaatatcttcgtttcaaaactagacagaatcattcccacaaactgcgttgtgatgtgttctttcaactcactgagtttaacctttcttttcatagagcagttaggaaacaatctgtttgtaaattctgtaagtggatattctgacatcttgtggccttcgttggtaacgggatttcttcatattctgttagacagaagaattctcagtaacttccttgtgttgtgtgtattcaactcacagagttgaacgattctttacacacagcagacttgaaacactctttttgtggaatttgcaagtggagatttcagccgctttcaggtcaatggtagaataggaaatatcttcctatagaaactagacagaatgattctcagaaactcctttgtgatgtgtgcgttcaactcacagagttttaccattcttttcatagagcagttaggaaacactctgtttgtaaagtctgcaagtggatattcagacctctttgaggccttcgttggaaacgggatttcttcatattctgctagagagaagaattctcagtaacttccttgtgttgtgtgtattcaactcacagagttcaacgatcctttacacagagcagacttgaaacactctttttgtggaatttgcaagtggagatttcagccgctttgaagtcaatggtagaaaaggaaatatcttcgtataaaaagtagacagaatgattctcagaaactcctttgtgatgtgtgcattcaactcacagagtttaacctttcttttcatagagcagttaggaaacactctgtttgtaaagtctgcaactggatattcagacctccttaaggccttcgttggaaacgggatttcttcatattatgctagacagaagaattcccagtaacttcccttgtgttgtgtgtgttcaactcacagagttgaactttcatttacacagagcagatttgaaacactctttttgtggaatttgcaagtggagatttcaagcgctttgaggtcaaaggcagaaaaggaaatatcttcgtataaaaactagacagagtctttctcagaaactgctctgtgatgtgtgcgttcaactctcagagtttaacttttcttttcattcagcagtttggaaacactctgtttgtaaagtttgcacgtggacattgtgaccacttagaggccttcgttggaaacgggtttttttcatgtaaggctagacagaagaattcccaataacttccttgtgttgtgtgcactcaagtcacagagatgaatgttcccttagacagagcagatttgaaacactctatttgtgcaatttgcaagtgtagatttcaagcgctttaaggtcaatggcagaaaaggaaatattttcgtttcaaaactagacagaatgattctcagaaactcctttgtgatatgtgcgttcaactcacagagtttaacctttcttttcatagagcagttaggaaacactctgtttgtaatgtctgcaagtggatattcagacatctttgaggctttcgttggaaacgggatttcttcatattctgctagacagaagaattctcagaaacttccttgtgttgtgtgttttcaactcacagagttgaacgatcctttaccacagagcagacttgaaacactctttttgtggaatttgcaagtggagatttcagccgctttgaggtcaatggtagaaaaggaaatatcttcgtataaaaactagacagaatgattctcagaaactcctttgtgatgtgtgcgttcaacacacagagttaaacttttcttttcatagagcagttaggaaacactctgtttgtaaagtctgcaagtggatattcagacctctttgaggccttcggtggaaacgagatttcttcatattatgctagacagaacaattctcagtaacttccttgtgttgtgtgtattcaactcacagagttgaacgatcctttacagagagcacacttgaaacactctttttgtggaatttgcaagtggagatttcagccgctttgaggtcaatggtagaataggaaatatcttccaatagaaactagacagaatcattctcagaaactgctctgcgatgtgtgcgttcaactctcagagtttaacttttcttttcattcagcagtttggaaacactctgtttgtaaagtctgcacgtggataatttgaccacttagaggccttcgttggaaacgggtttttttcatggaaggctagacagaagaattcccagtaacttccttgtgttgtgtacattcaactcacagagttgaacgttcccttagacagagcagatttgaaacactctttttgtgcaattggcaaatggagatttcaagcgctttaaggtcaatggtagaataggaaatatcttcgtttgaaaactagacagaatcattcccacaaactgcgttgtgattgtgttcgttcaactcacagagtttaacctttctgttcatagagcagttaggaaacactctgtttgtaaagtctataagtggatattctgacatcttgtggccttcgttggaaacgggatttcttcatattctgctagacagaagaattctcagtaacttccttgtgttgtgtgtattcaactcacagagttgaacgatactttacacagagcagacttgtaacactctttttgtggaatttgcaagtggagatttcagccgctttgaagtcaaaggtagaaaaggaaatatcttcctataaaaactagacagaatgattctcagaaactcctttgtgatgcgtgcgttcaactcacagagtttaacctttcttttcatagtgcagttaggaaacactctgtttgtaaagtctgcaagtggatattcagacctccttgaggccttcgttggaaacgggatttctacatattatgctagacagaagaattctcagtaacttccttgtgttgtgagtattcaactcacagatttgaacgatcctttacacagagcagacttgaaacagtctttttgtggaatttgcaagtggagatttcagcctctttgaggtcaatggtagaataggaaatatcttcctatagaaactagacagaatcattctcagaaactgctctgcgatgtgtgcgttcaactctcagagtttaacttttcttttcattcagcagtttggaaacactctgtttgtaacgtctgcacgtgaataatttgaccacttagaggccttcgttggaagcgggtttttttcatgtaaggctagacagaagaattcccagtaacttccttgtgttgtgtgcattcaactcacacagttgaacgttcccttagacagagcagatttgaaacactctatttgtgcaatttgcaagtgtagatttcaagcgctttaaggtcaatggcagaaaaggaaatttcttcgtttcaaaactagacagaatcattcccacaaactgcgttgtgatgtgttcgttcaactcacagagtttaacctttctgttcatagagcagttaggaaacactctgtttgtacagtctgcaagtggatattcagacctccttgaggccttcgttggaaacgggatttcttcatattctgctagacagaagaattctcagaatcttccttgtgttgggtgtattcaactcacagagttgaacgatcctttacacagagcagacttgaaacactctttttgtggaatttgcaagtggagatttcagccgctttgaggtccatggtagaaaaggtaatatcttcgtataaaaactagacagaatgattctcagaaactcctttgtgatgtgtgcgctcaactcacagagtttaacctttcttttcatagagtagttaggaaacactctgtttgtaaagtctgcaagtggatattcagacctctttgaggccttcgtaggaaacgggatttcttcatattatgctagacagaagaattcccagtaacttccttgtgttgtgtgtgttcaactcacagagttgaactttcatttacacagagcagatttgaaactctctttttgtggaatttgcaaatggagatttcaagcgctttgaggtcaaaggcagaaaaggaaatatcttcgtataaaaactagacagaatcattctcagaaactgctctgcgatgtgtgcgttcaactctcagagtttaacttttcttttcattcagcagtttggaaacactctgtttgtaaagtctgcacgtggataatttgaccacttagaggccttcgttggaaacgggtttttttcatgtaaggctagacggaagaattcccagtaacttccttgtgttgtgtacattcaactcacagagttgaacgttcccttagacagagcagatttgaaatactctttttgtgcaattggcaagtggagatttcaagcgctataaggtcaatggcagaaaaggaaatatcttcgtttcaaaactagacagaatcattcccacaaactacgttgtgatgtgttcgttcaactcacagagtttaacctttcttttcatagagcagttaggaaacagtctgtttgtaaattctgtaagtggatattctgacatcttgtggccttcgttggaaacgggatttcttcatattctgctagacagaagaattctcagaatcttccttgtgttgtgtgtattcaactcacagagttgaacgacggtttacacagagcagatttgaaacactcatttggtggaatttgcaagtggagatttcagccgctttgaggtcaatggtagaaaaggaaatatcttcgtataacaactagacagaatgattctcagaaactcctttgtgatgtgtgtgttcaactcacagagtttaacttttcttttcatagagcagttagtaaacactctgtttataaagtctgcaagtggatattcagacccctttgtggccttcgttggaaacgggatttcttcatattatgctagacagaagaattctcagtaacttcccttgtgttgtgtgtattcaactgacagagttgaactttcatttagagagagcagttttgaaacactgtttttgtggaatttgcaagtggagatttcaagcgctttggggccaaaggcagaaaaggaaatatcttcgtataaaaactagacagaatcattctcagaaactgctctgcgatgtgtgcgttcaactctcagagtttaacttttcttttcattcagcagtttggaaacactctctttgtaaagtctgcacgtggatattttgaccacttagaggcattcgttggaaacgggtttttttcctgtaaggctagacagaagaattcccagtaacttccttgtgttgtgtgcattcaactcacagagttgaacgttcccttagacagagcagatttgaaacactctatttgtgcaatttgcaagtgtagatttcaagcgctttaaggtcaatggcagaaaaggaaatatcttcgttcaaaactagacagaatcattcccacaaactgcgttgtgatgtgttcgttcaactcacagagattaacctttctgttcatagagcagtgaggaaacactctgtttgtaaagtctgtaagtggatattctgacatcttgtggccttcgttggaaacgggatttcttcatattctgctagacagaagaattctcagtaacttccttgtgttgtgtgtattcaactcacagagttgaacgatcctttacacagagcatagttgaaacactcttgttgtggaatttgcaagtggagatttcagccgctttgaggtcaatggtagaataggaaatatcttcctatagaaactagacagaatgattctcagaaactcctttgtgatgtctgcgttcaactcacagagttaaactttcttttcatagagcagttaggaaacactctgtttgtaaagtctgcaagtggatattcagacctccttgaggccttcgttggaaaagggatttcttcatattatgctagacagaagtattcccagtaacttccttgtgttgtgtgtgttcaactcacagagttgaactttcatttacaatgagcagatttgaaacactctttttgtggaatttgcaagtggagatttcaagcgctttgaggccaaaggcagaaaaggaaatatcttcgtataaaaactagacagaatcattctcagaaactgctctgcgatgtgtgcgttcaactctcagagtttaacttttcttttcattcagcagtttggaaacactctgtttgtaaagtctgcacgtggatattttgaccacttagaggccttcgttggaaacgggtttttttcctgtaaggctagacagagaattcccagtaacttccttgtgttgtgtgcattcaactcacagagttgaacgttcccttagacagagcagatttgaaacactctgtgcaatttgcaagtgtagatttcaagcgctttaaggtcaatggcagaaaaggaaatatcttcgtttcaaaactagacagaatcattcccacaaactgcgttgtgatgtgttcgttcaactcacagagtttaacctttcttttcatagagcagttaggaaacactctgttggtaaattctgtaagtggatattctgacatcttgtggccttcgttggaaacgggatttctacatattctgctagacagaagaattctcagtaacttccttgtgttgtgtgtattcaactcacagagttgaaagatcctttacacagagcagacttgaaacactctttttgtggaatttgcaagtggagatttcagccgctttgaggtcaatggtagaaaaggaaatatcttcgtataaagactagacagaatgattctcagaaactcctttgtgatgtgtgcgttcaactcacagagtttaacctttcttttcatagagcagttaggaaacactctgtttgtaaagtctgcaagtggacattcagacctctttgaggccttcgttggaaacgggtttttttcatataaggctagacagaagaattcttagtaacttccttgtgttgtgtgtattcaactcacagagttgaatgatcctttacacagaacagtcttgaaacactctttttgtggaatttgcaattggagatttcagccgctttgaggtcaatggtagaataggaaatatcttcctatagaaactagacagaatgattctcagaaactcctttgtgatgtgtgtgttcaactctcagaatttaacctttcttttcatagagcagttagtaaacactctgtttataaagtctgcaagtggatattcagatccctttgtggccttctttggaaacgggatttcttcatattatgctagacagaagaattctcagtaacttccttctgttgtgtgtattcaactgacagagttgaactttcatttagagagagcagatttgaaacactgtttttgtggaatttgcaagtggagatttcaagcgctttggggccaaaggaagaaaaggaaatatcttcgtataaaaactagacagaatcattctcagaaactgctctgcgatgtgtgcgttcaactctcagagtttaacttcgcttttcattcagcagtttggaaacactctgtttgtaaagtctgcacgtggataatttgaccacttagaggccttcgttggaaacgggtttttttcatgtaaggctagacagaagaattctcagtaacttccttgtgttgtgtgtattcaactcacacagttgaaggatcctttacacagagcagacttgtaacactctttttgtggaatttgcaagtggagatttcagccgctttgaagtcaaaggtagaaaaggaaatatcttcctataaaaactagacagaatcattcccacaaactgcgttgtgatgtgttcgttcatctcacagagtttaacctttcttttcatagagcagttaggaaacagtctgtttgaaaattctgtaagtggatattctgacatcttgtggccttcgttggaaacgggatttcttcatattctgctagacagaagaattctcagtaacttcccttgtgttgtgtgtattcaactcacagagttgaacgatcctttacacagagcagacttgtaacactctttttgtggaatttgcaagtggagatttcagccgctttgaagtcaaaggcagaaaaggaaatgtcttcgtttcaaaactagacagaatgattctcagaaactcctttgtgatgtgtgcgttcaactcaaagagtttaacctttcttttcacagagcagttaggaaacactctgtttgtaaagtctgcaagtggatattcagacctccttgaagccttcgttggaaaagggatttcttcatattatgctagacagaagaattcccagtaacttccttgtgttgtgtgtgttcaactcacagagttgaactttcatttacacagagcagatttgaaacactctttttgtggaatttgcaagtggagatttcaagcgctttgaggccaagaggcgagaaaaggaaatatcttcgtttcaaaactagacagaatcattctcagaaactgctctgcgatgtgtgcgttcaactctcagagtttaactttgcttttcatttagcagtttggaaacactctgtttgtaaagtctgcacgtggatattttgaccacttagaggccttcgttgtaaacgggtttctttcctgtaaggctagacagaagaattcccagtaacttccttgtgttgtgtgcattcaactcacagagttgaacgttccctagacggagcagatttgaaacactctatttgtgcaatttgcaagtgtagatttcaagggctttaaggtcaatggcagaaaagggaatatcttcgtttcaaaactagacagaatgattctcagaaactactttgtgatgtgtgcgttcaactcacagagtttaacctttcttttcatagagcagttaggaaacactctgtttgtaaagtctgcaagtggatattcagacctctttgaggccttcgttggaaacggaatttcttcatactgtgctagacagaagaattctcagtaacttccttgtgttgtgtgtattcaactcacagagttgaacgatcctttacacagagcggacttgaaacacactttttgtggaatttgcaagtggagatttcaagcgctttgaggccaaaggcagaaaaggaaatatcttcgtataaaaactagacagaatgattctcagaaactcctttgtgatgtgtgcgtttaactcacagagtttaacctttctcttcatagagcagtttggaaacactctgtttgtaaagtctgcaagtggatattcagacctccttgaggtcttcgttggaaacgggatttcttcatattatgctagacagaagaattctcagtaacttccttgtgttgtgtgtattcaactgacagagttgaactttcatttagagagagcagatttgatacactgtttttgtggaatttgcaagtggagatttcaagcgctttgcggccaaaggcagaaaaggaaatatcttcgtataaaaactagacagaatcattctgagaaactgctctgcgatgtgtgcgttcaactctcagagtttaacttttcttttcattcagcagtttggaaacactctgtttgtaaagtctgcacgtggatattttgaccacttagaggccttcgttggaaacgggtttttttcctgtaaggctagacagaagaattcccagtaacttccttgtgttgtgtacattcaactcacatagttgaacgttcccttagacagagcagatttgaaacactctttttgtgcaattggcaaatggagatttcaagcgctttaaggtcaatggcagaaaaggaaatatcttcgtttcaaaactagacagaatgattctcagaaactcctttgtgatgtgtgcattcaactcacagagtttaacctttcttttcatagagcagttaggaaacactctgtttgtaaagtctgcaagtggatattcagacctctttgaggccttcgttggaaacgggatttcttcatattctgctagacagaagaattctcagtaacttccttgtgttgtgtgtattgaactcgcagagttgaacgatcctttacacagagcagacttgaaacactctttttgtggaatttgcaagtggagatttcagccgctttgaggtcaatagtagaaaaggaaatatcttcgtagaaaaactagacagaatgattctcagaatctcctttgtaatgtgtgcgttcaactcacagagtttaacctttcttttcataaagcagttaggaaacactctgtttgtaatgtctgcaagtggatattcagacctctttgaggccttcgttggaaacgggatttcttcatattctgctagacagaagaattcccagtaacttctttgtgttgtgtgtgttcaactcacagagttgaactttcatttacacagagcagatttgaaacactctttttgtggaatttgcaagtggagatttcaagcgctttgaggccaaaggcagaaaaggaaatatcttcgtataaaaactggacagaatcattctcagaaactgctctgcgatgtgtgcgttcaactctcagagtttaacttttcttttcattcagcagtttggaaacactctgtttgtaaagtctgcacgtggataatttgaccacttggaggccttctttggaaacgggtttttttcctgtaaggctagacagaagaattcccagtaacttccttgtgttgtgtgcattcaactcacagagttgaaagttcccttagacagagcagatttgaaacactctatttgtgcaatttgcaagtgtagatttcaagcgctttaaggtcaacggcagaaaaggaaatatcttggtttcaaaactagacagaatgattctcagaatcttctttgtgatgtgtgcgttcaactcacagagtttaacctttcttttcatagagcagttaggaaacactctgtttgtaaactctgcaagtggatattcagacctctttgaggccttcgttggaaacgggatttcttcatactgtgctatacagaagaattctcagtaacttccttgtgttgtgtgtattcaactcacagagttgaacgaccctttacacagagcggacttgaaacactctttttgtggaatttgcaagtggagatttcagccgcgttgaggtcaatggtagaaaaggaaatatcttcgtataaaaactagacagaatgattctcagaaacttcattgtgatgtgtgcgttcaactcacagagtttaacctttcttttcatagagcagttaggaaacactctgtttgtaaactctgcaagtggatattcagaccactttgaggccttcgttggaaacgggatttctccatactgtgctagacagaagaattctcagtaacttccttgtgttgtgtgtattcaactcacagagttgaacgatgctttacacagagcggacttgaaacactcgttttgtggaatttgcaagtggagatttcagccgatttgaggtcaatggtagaaaaggaaatatcttcgtataaaaactagacagaatgattctcataaactcctttgtgatgtgtatgttcaactcacagagtttaacttttctattcatagagtagttaggaaacactctgtttgtaaagtctgcaagtggatattttgacctctttgaggcctccgttggaaacgggttttcttcatgtaaggctagacagaagaattctcagtaacttccttctgttgtgtacattcaactcacagagttgaacgttcccttagacagagcagatttgaaacactctttttgtgcaattggcaagtggagatttcaagcgctttaaggtcaatggcagaaaaggaaatatcttcgtttcaaaacgagacagaatcattctcagaaactgctctgcgatgtgtgcgttcaactctcagagtttaacttttcttttcattcagcagtttggaaacactctgtttgtaaagtctgcacgtggataatttgaccacttagaggccttctttggaaacgggtttttttcatgtaaggctagacagaagaattctcagtaactttccttgtgttgtgtgtattcaactcacagagttgaacgatcctttacacagagcagacttgtaacactctttttgtggaatttgcaagtggagatttctgccgctttgaagtcaaaggtagaaaaggaaatatcttcctataaaaactagacagaatgattctgagaaactcctttgtgatgtgtgcattcaactcacagagtttaacctttcttttcatagagcagttaggaaacactctgtttgtaaagtctgcaagtggatattcagacctccttgaggccttcgttggaaacgggatttaatcatattctgctagacagaagaattctcagtaacttccttttgttgtgtgtattcaactcacagagttgaatgatcctttacacagagcagacttgaaacactctttttgtggaatttgcaagtggagatttcagccgctttgagttcaatggtagaataggaaatatcttcctatagaaactagacagaatcattctcagaagctgctctgcgatgtgtgcgttcaactctcagagtttaacttttcttttcattcagcagtttggaaacactctgtttgtaaagtctgcacgtggataatttgaccacttagaggccttcgttggaaacgggtttttttcatgtaaggctagacagaagagttctcagtaacttcccttgtgttgtgtgtattcaactcacacagttgaacgatcctttacagagagcagacttgtaacactctttttgtggaatttgcaagtggagatttcagccgctttgaagtcaaagtagaaaaggaaatatcttcctataaaaactagacagaatcattcccacaaactgcgttgtgatgtgttcgttcaactcacagagtttaacctttcttttcatagagcatttaggaaacactctgtttgtaaagtctgcaagtggatattcagacctctttgaggccttcgttggaaacgggtttttttcatataaggctagacagaagaattctcagaaacttccttgtgttgtgtgtcttcaactcacagagttgaacgatcctttacacatagcagacttgaaacacactttttttggtattttcaagtggagatttcagccgctttgaggtcaatggtagaaaaggaaatatcttcgtataaagactagacagaatgattctcagaaactcctttgtgatgtgtgcgttgaactcacagagtttaacgtttcttttcatagagcagttaggaaacactctgtttgtaaagtctgcaaggggatattcagacctctctgaggccttcgttggaaacgggatttcttcatattctgcttcacagaagaattctcagtaacttccttgtgttgtgtgtattcaactgacagagttgaactttcatttagacagagcagatttgaaaagctctttatgtggaatttgcaattggagatttcaagcgctttgaggccaaagacagaaaaggaaatatcttcgtataaaaactagacagaatcattctcagaaactgctctgcgatgtgtgcgttcaactctcagagtttaacttttcttttcattcagcagtttggaaacactctgtttgtaaagtctgcacgtggataacttgaccacttagaggccttcgttggaaacgggtttttttcatgtaaggctagacagaagaattcccagtaacttccttgtgttgtgtgcattcaactcacagagttgaacgttcccttagacagagcagatttgcaacactctatttgtgcaatttgcaagtgtagatttcaagcgctttaaggtcaatggcagaaaaggaaatatcttcgtttcaaaactagacagaatcattcccacaaactgcgttgtgatgtgttcgttcaactcacagagtttaacctttccgttcatagagcagttaggaaacacactgtttgtaaagtctgtaagtggatactctgacatcttgtggccttcgttggaaacgggatttcttcatattctgctagacagaagaattctcagtaacttccttgttttgtgtgtattcaactcacagagttgaacgatcctttacacagagcatacttgaaacactcttcttgtggaatttgcaagtggagatttcaaccgctttgaggtcaatggtagaataggaaatatcttcctatagaaactagacagaatgattctcagaaacttctttgtgatgtgtgcgttcaactcacagagtttaacctttcttttcatagagcagttaggaaacactttgtttgtaaagtctgcaagtggatattcagacctctttgaggccttcgttggaaacgggatttcttcatactatgctagacagaagaattcccagtaacttccttgtgttgtgtgtgttcaactcacagagttgaactttcatttacacagagcagatttgaaacactctttttgtggaatttgcaaatggagatttcaagcgctttgaggtcaaaggcagaaaagaaaatatcttcgtataaaaactagacagaatcattctcagaaactgctgcgtgatgtgtgcgttcaactctcagagtttaacttttcttttcattcagcggtttggaaacactctgtctgtaaagtctgcacgtggatattttgaccacttagaggccttcgttggaaacgggtttttttcatgtaaggctagacagaagaattcccagtaacttccttgtgttgtgtgcattcaactcacagagctgaacattcccttgacagagcagatttgaaacactctatttgtgcaatttgcaagtgtagatttcaagcgctttaaggtcaatggcagaaaaggaaatatcttcgtttcaaaactagacagaatgattctcagaaactcctttgtgatgtgtgcgttcagctaacagagtttaacctttcttttcatagagcagttcggaaacactctgtttgtaaagtctgcaagtggatattcagacctctttgaggccttcgttggaaacgggatttcttcatattctgctagacagaagaattctcagtaacttccttgtgttgtgtgtattcaactcacagagttgaacgattctttacacagagcagacctgaaacactctttttgtggaatttgcaagtggagatttcagccgctttgaggtcaatggtacaaaaggaaatatcttcgtataaagactagacagaatgattctcagaaactcctttgtgatgtgtgtgttcaactcacagagcttaacctttcttttcatagagcagttagtaaacactctgtttataaagtctgcaagtggatattcagacccctttgaggccttcgttggaagcgggatttcttcatattatgctagacagaagaattctcagtaacttccttgtgttgtgtgtattcaactgacagagttgaacttttatttagagagagcagatttgaaacactgtttttgtggaatttgcaagtggagatttcaagcgctatggggccaaaggcagaaaaggaaatatctttgtataaaaactagacagaatgattctcagaaactgctgcgtgatgtgtgcgttcaactctcagagtttaacttttcttttcattcagcggtttggaaacactctgtttgtaaagtctgcacgtggatattttgaccacttagaggccttcgttggaaacgggtatttttcatgtaaggctagacagaagaattcccagtaactttccttgtgttgtgtacattcaactcacagagttgaacgttcccttagacagagcagatttgaaacactctttttgtgcaattggcaagtggtgatttcagccgctttgaggtcaatggtagaaaaggaaatatcttcgtataaaaactagacagaatcattcccacaaactgcgttgtgatgtgttcgttcaactcacagagtttaacctttcttttcatagagcagttaggaaacagtctgtttgtcaattctttaagtggatattctgacatcttgtggccttcgttggaaacgggatttcttcatattctgctagacagaagaattctcagaatcttccttgtgttgtgtgtattcaactcacagagttgaacgatcctttacacagagcagacttgaaacactctttttgtgcaatttgcaagtggagatttcaaccgctttgaggtccatggtagaaaaggaaatatcttcgtataaaaactagacagaatgattctcagaaactcctttgtgatgtgtgcgttcaactcacagagtttaacctttcttttcatagagcagttaggaaacactctgtttgtaaagtctgcaagtggatattcagacctccttgacgccttcgttggaaacgggatttcttcatattatgctagacagaagaattctcagtaacttccttgtgttgggtgtattcaactgacagagttgaactttcctttagacagatcagatttgaaacactctttttgtggaatttgcaaggtgagatttcaaccgctttgaggccaaaggcagaaaaggaaatatcttcctttaaaaactagacagaatcattctcagaaactgctctgtgatgtgtgcgttcaactctcagagtttaacttttctgttcattcagcagtttgtaaacactctgtttgtaaagtctccacgtggatattttgaccacttagaggccttcgttggaaacgggtttttttcatgtaaggctagacagaagaattcccagtaacttccttgtgttgtgtgcattcaactcacagagttgaacgttcccttagacagagcagatttgaaacactctatttgtgcaatttgcaagtgtagatttcaagcgctttaaggtcaacggcagaaaaggaaatatcttggtttcaaaactagacagaatgattctcagaaacttctttgtgatgtctgcgttcaactcacagagtttaacatttcttttcatagagcagttaggaaacactctgtttgtaaagtctgcaattggatattcagacctctttgaggccttcgttggaaacgggatttcttcatactatgctagacagaagaattctcagtaacttccttgtgttgtgtgtattcaactcacagagttgaacgatcctttacacagagcagacttgtaacactctttttgtggaatttgtaagtggagatttcagccgctttgaagtcaaaggtagaaaaggaaatatcttcctataaaaactagacagaatgattctcacaaactcctttgtgatgtgtgcgttcaactcacagagtttaacctttcttttcatagagcagttaggaaacactctgtttgtaaagtctgcaagtggatattcagacatctttgaggccttcgttggaaacgggatttcttcatgttctgctagacagaagaattctcagtaacttccttgtgttgtgtgtattcaactcacagagttgaacgatcctttacacagagcagacttgtaacactctttttgtggaatttgcaagtggagatttctgccgctttgaggtcaatggtagaaaaggaaatatcttcctataaaaactacacagaatgattctcagaaactcctttgtgatgtgtgcgttcaactcacagagtttaacttttcttttcatagagcagttagcaaacactctgtttgtaaattctgcaagtggatattcagacctctttgaggccttcgttggaatcgggatttcttcaaattctgctaggcagaagaattcccagtaacttccttgtgttgtgtgtgttcaactcacagagttgaactttgatttacacagagcagatttgaaacactctttttgtggaatttgcaagtggagatttcaagcgctttgaggccagaggcagaaaaggaaatatcttcgtataaaaactagacagaatcattctcagaaactgctctgcgatgtgtgcgttcaactctcagagtttaacttttcttttcattcagcagtttggaaacactccgtttgtaaagtctgcacgtggatattttgaccacttagaggccttcgttggaaacgggtttttttcctgtaaggctagacagaagaattcccagtaacttccttgtgttgtgtacattcaactcacagagttgaacgttcccttagacagagcagatttgaaacactctttttgtgcaattggcaaatggagatttcaagcgctttaagttcaatggcagaaaaggaaatatcttcgtttcaaaactagacagaatcattcccacaaactgcgttgtgatgtgttcgttcaactcacagagtttaacctttctgttcatagagcagttaggaaacactctgtttgtaaagtctgacagtggatattctgacatcttgtggccttcgttggaaacaggatttcttcatattctgctagacagaagaattctcagtaacttccttgtgttgtgtgtattcaactcacagagtttaatgatcctttacgcagagcagacttgaaacaatctttttgtggaatttgcaagtggagatttcagccgctttgatgtcaatggtagaataggaaatatcttcctatagaaactagacagaatgattctcagaaactcctttgtgatgtgtgcgttcaactcacagagtttaacctttcttttcatagagcagttaggaaacactctgtttgtaatgtctgcaagtggatattcagacctctttgaggcctttgttggaaacgggatttcttcatattgtgctagacagaagaattcccagtaacttccttgtgttgtgtgtgttcaactcacagagttgaactttcatttacacagagcagatttgaaacactctttttgtggaatttgcaaatggaggtttcaagcgctttgaggccaaaggcagaaaaggaaatatcttcgtataaaaactagacagaaccatgctgagaaactgctctgcgatgtgtgcgttcaactctcagagtttaacttttcttttcattcagcagtttggaaacactctgtttgtaaagtctgcacgtggataacttgaccacttagaggccttcgttggaaacgggtttttttcatgtaaggctagacagaagaattcccagtaacttccttgtgttgtgtacattcaactcacagagttgaacgttcccttagacagagcagatttgaaacactctttttgtgcaattggcaaatggagatttcaagcgctttaagttcaatggcagaaaaggaaatatcttcgtttcaaaactagacagaatcattcccacaaactgcgttgcgatgtgttcgttcaactcacagagtttaacatttcttttcatagagcacttaggaaacagtctgtttgtaaattctgtaagtggatattctgacatcttgtggccttcgttggaaacaggatttcttcatattctgctagacagaagaattcccattaacttccttgtgttgtgtgtgttcaactcacagagttgaactttcatttacacagagcagatttgaaacactctttttgtggaatttgcaaatggagatttcagccgcgttgaggtcaatggtagaaaaggaaatatcttcgtttcaaaactagacagaatgattctcagaaactcctttgtgatgtgtgcgttcaactcacagagtttaacctttcttttcatagagcagttaggaaacactctgtttgtaaagtctgcaagtggatattcagacctctttgaggccttcgatggaaacgggtttttttcatataaggctagacagaagaattcccagtaacttccttgtgttgtgtgtgttcaactcacagagttgaactttcatttacacagagcagatttgaaacactctttttgtggaatttgcaaatggagatttcaagcgctttgaggccaaaggcagaaaaggaaatgtctacgtttcaaaactagacagaatcattctcagaaactgctgcttgatgtgtgcgttcaactctcagagtttaacttttcttttcattcagcggtttggaaacactctgtttgtaaagtctgcacgtggatattttgaccacttagaggccttcgttggaaacgggtttttttcatgtaaggctagacagaagaattcccagtaacttccttgtgttgtgtacattcaactcacagagttgaacgttcccttagacagagcagatttgaaacactctttttgtgcaattggcaagtggagatttcaagcgctttaaggtcaatggcagaaaaggaaatatcttcgtttcaaaactacacagaatgattctcagaaacttcattgtgatgtgtgcgttcaactcacagagtttaacctttcttttcatagagcagttgggaaacagtctgtttgtaaattctataagtggatattctgacatcttgtggccttcgttggaaacgggatttcttcatattctgctagacagaagaattctcagtaacttcgttgtgttgtgtgtattcaactcacagagttgaacgatcctttacacagagcagacttgaaacacgctttttgtggaatttgcaagtggagatttcagccgctttgaggtcaatggtagaaaaggaaatatcttcgtataaagactagacagaatgattctcagaaaatcttttgtgatgtgtgcgttcaactcacagagtttaacttttcttctcatagagcagttaggaaatactctgtttgtaaagtctgcaagtggatattcagacctctttgaggccttcgttggaaacgggatttcttcatattatgctagacagaagaattctcagtaacttccttgtgttgtgtgtattcaactgacagcgttgaactttcatttagagagagcagatttgaaacactgtttttgtggaatttgcaagtggagatttcaagcgctttggggccaaaggctgaaaaggaaatatcttcgtataaaaactagacagaaatcattctcagaaactgctgcgtgatgtgtgcgttcaaccctcagagtttaacttttcttttcattcagcggtttggaaacactctgtttgtaaagtctgcacgtggatattttgaccacttagaggccttcgttggaaacgggattttttcatgtaaggctagacagaagaattcccagtaacttccttgtgttgtgtgcattcaactcacagagttgaacgttcccttagacagagcagatttgaaacactctatttgtgcaatttgcaagtgtagttttcaagctctttaaggtcaacggcagaaaaggaaatatcttggtttcaaaactagacagaatcattcccacaaactgcgttgtgatgtgttcgttcaactcacagagtttaacctttctgttcatagagcagttaggaaacactctgtttgtaaagtctgcaagtggatattctgacatcttgtggccttcgttggaaacgggatttcttcatattctgctagacagaagaattctcagtaacttccttgtgttgtgtgtattcaactcacagagttgaacgatcctttacacagagcagacttgaaacactccttttgtggaatttgcaagtggagatttcagccgctttgaggtcaaaggtagaataggaaatatcttcctatagaaactagacagaatgattctcagaaactcctttgtgatgtgtgtgttcaactcacagagtttaacctttcttttcatagagcagttaggaaacactctgtttgtaaagtctgcaagtggatattcagacccctttgaggccttcgttggaaacgggatttcttcatattatgctagacagaagaattctcagtaacttccttctgttgtgtgtattcaactgacagagttgaactttcatttagagagagcagatttgaaacactgtttttgtggaatttgcaaatggagatttcaagcgctttggtgccaaaggcagaaaaggaaatatcttcgtataaaaactagacagaatcattctcagaaactgctgcgtgatgcgtgcgttcaactctcagagtttaacttttcttttcattcagcggtttggaaacactctgtttgtaaagtctgcaagtggatattcagacctctttgaggccttcgttggaaacgggatttcttcctattatgctcaacagaagaattcccagtaacttccttgtgttgtgtgcattcaactcacagagttgaacgttcccttagacagagcagatttgaaacactctctttgtgcaatttgcaagtgtagatttcaagcgctttatggtcaacggcagaaaaggaaatatcttcgtttcaaaactagacagaatcattcccacaaactgcgtagtgatgtgttcgttcaactcacagagtttaacctttcttttcatagagcagttaggaaacagtctgtttgtcaattctgtaagtggatattctgacatcttgtggccttagttggaaacgggatttcttcatattctgctagacagaagaattcccagtaacttccttgtgttgtgtgtattcaactcacagagttgaaagatcctttacacagagcagacttgtaacactctttttgtggaatttgcaagtggagatttcagccgctttgaagtcaaaggtagaaaaggaaatatcttcctataaaaactagacagaatgattctcagaaactcctttgtgatgtgtgcgttcaacccacagagtttaacctttcttttcatagagcagttaggaaacactctgtttgtaaagtctgcaagtggatattcagacctctttgaggccttcgttggaaaagggatttcttcatattctgctggacagaagaattccccgtaacttccttgtgttgtgtgtgttcaactcacagagttgaactttcatttacacagagcagatttgaaacactctttttgtggaatttgcaagtggagatttcaagcgctttgaggccaaaggcagaaaaggaaatatcttcgtataaaaactagacagaatcattctcagaaactgctctgtgatatgtgcgttcaactctcagagtttaacttttcttttcattcagcagtttggaaacactctgtttgtaaagtctgcacgtggatattttgaccacttagaggccttcgttggaaacgggttttttttcatgtaaggctagacagaagcattcccagtaacttccttgtgttgtgtgcattcaactcacagagatgaacgttcccttagacagagcagatttgaaacactctatttgtgctatttgcaagtgtagatttccagcgctttaaggtcaatggcagaaaaggaaatatcttcgtttcaaaactagacagaatgattctcagaaactcctttgtgatgtgtgcgttcaactcacagagtttaacttttcttttcatagagcagttaggaaacactctgtttgtaaagtgtgcaagtggatattcagacctccttgaggccttctttggaaaagggatttcttcatattatgctagacagaataattctcagtaacttccttgtgttgtgtgtattcaactcacagagttgaaggatcctttacagagagcagacttgaaacactctttttgtcgaatttgcaagtggagatttcagccgctttgaggtcaatggtagaataggaaatatcttcttatagaacctagacaaaatgattctcagaaacccctttgtgatgtgtgcgttccactcacagagtttaacctttcttttcatagagcagttaggaaacactctgtttgtaaagtctgcaaggggatatttagacctctttgaggccatcgttggaagcgggatttcttaatattctgctagacagaataattctcagtaacttccttgtgttgtgtgtattcaactgacagagttgaactttcatttagagagagcagatttgaaacactgtttttgtggaatttgcaagtagagatttcaagcgctttggggccaaaggcagaaaaggaaatatcttcgtataaaaactagacagaatcattcccacaaactgcgttgtgacgtgttcgttcaactcacagagtttaacctttcttttcatagagcagttaggaaacactctgttggtaaattctgtaagtggatattctgacatcttgtggccttcagtggaaacgggatttcttcatattctgctagacagaagaattcccagtaacttccttgtgttgtgtacattcaactcacagagttgaacgttcccttagacagagcagatttgaaacactctttttgtgcaattggcaagtggagatttcaagcgctttgaggtcaatggcagaaaaggaaatatcttcgtttcaaaactagacagaatcattcccacaaactgcgttgtgatgtgttcgttcaactcacagagtttaacctttctgttcatagagcagttaggaaacactctgtttgtaaagtctgtaagtggatattctgacatcttgtggccttcgttggaaacgggatttcttcattttctgctagacagaagaattctcagtaacttccttgtgttgtgtgtattcaactcgcagagttgaacgatcctttacacagagcagacttgaaacactctttttgtggaatttgcaagtggagatttcagccgctttgaggtcagtggtagaaaaggaaatatcttcgtataaagactagacagaatgattctcagaaactcctttgtgatgtgtgtgttcaactcacagagtttaacctttcttttcatagagcagttagtaaacactctgtttataaagtctgcaagtggatattcagacctccttgaggccttcgttggaaacgggatttcttcatattatgctagacagaagaattctcagtaacttcctcgtgttgtgtttattcaactgacagagttgaactttcatttagagagagcagatttgaaacactgtttttgtggaatttgcaagtggagatttcaagcgctttggggccaaaggcagaaaaggaaatatcttcgtataaaaactagacagaatcattctcagaaactgctgcgtgatgggtgcgttcaactctcagagtttaacttttcttttcattcagcggtttggaaacactctgtttgtaaagtctgcacgtggatattttgaccacttagaggccttcgttggaaacgggtttttttcatgtaaggctagacagaagaattcccagtaacttccttgtgttgtgtacattcaactcacagagttgaacgttctcttagacagagcagatttgaaacactctttttgtgcaattggcaaatggagatttcaagcgctttaaggtcaatggcagaaaaggaaatatcttcgtttcaaaactagacagaatcattcccacaaactgcgttgtgatgtgttcgttcaactcacagagtttaacctttctgttcatagagcagttaggaaacactctgttttgtaaagtatgcaagtggatattcagacctccttgaggccttcgttggaaacgggatttcttcatattctgctagacacgaagaattctcagtaacttccttgtgttgtgtgtattcaactcacagagttgaacgatcctttacacagagcagacttgaaacactctttttgtggaatttgcatgtggagatttcagccgctttgaggtcaatggtagaaaaggaaatatcttcgtataaaaactagacagaatgattctcataaactcctttgtgatgtgtgcgttcaactcacagagtttaacctttcttttcatagagcagttaggaaacactctgtttgtaaaatctgcaagtggatattcagacccctttgaggccttcgttggaaacgggatttcttcatattctgctagacagaagaattcccagtaacttccttgtgttgtgtgtgttcaactcacagagttgaactttcatttacacagagcagatttgaaacactctttttgtggaatttgcaagtggagatttcaagcgctttgaggccaaaggcagaaaaggaaaatatcttcgtttcaaaactagacagaatcattctcagaaactgctctgcgatgtgtacattcaactctcagagtttaatttttcttttcattcagcagtttggaaacactctctttgtaaagtctgcacgtggatattttgaccacttagaggccttcgttcgaaacgggttttattcttgtaaggctagacagaagaattcccagtaacttccttgtgttgtgtgcattcaactcacagagttgaacgttcccttagacagagcagatttgaaacactctatttgtgcaatttgcaagtgtagatttcaagcgctttaaggtcaacggcagaaaaggaaatatcttcgttttaaaactagacagaatcattcccacaaactgcgttgtgatgtgttcgttcaactcacagagtttaacctttctgttcatagagcagttaggaaacactctgtttgtaaagtctgtaagtggatattctgacatattgtggccttcgttggaaacgggatctcttcatattctgctagacagaagaattctcagtaactgccttgtgttgtgtgtattcaactcacagagttgaacgatcctttacacagagcagacttgaaacactccttttgtggaatttgcaagtggagatttcagccgctttgaggtcaatggtagaataggaaatatcttcctgtagaaactagacagattgattctcagaaactcctttgtgatgtgtgcgttcaactcacagagtttaacctttcttttcatagagcagttaggaaacactctgtttgtaaagtctgcaagtggatattcagacctccttgagaccttcgttggaaacgggatttcttcctattatgctagacagaagaattcccagtaacttccttgtgttgtgtgtgttcaactcacagagttgagctttcatttacacagagcagatttgaaacactctttttgtggaatttgcaaatggagatttcaagcgctttgaggccaaaggcagaaaaggaaatatcttcgtataaaaactagacagaatcattctcagaaactgctctgtgatgtgtgcgttcaactctcagagtttaacttttcttttcattcagcagtttggaaacactctgtttgtaaagtctgcacgtggataattttaccacttagaggccttcgttggaaacgggtttttttcatgtaaggctagacagaagagttctcagtaacttccttgtgttgtgtgtattcaactcacagagttgaacgatcctttacacagagcagacttgtaacactctttttgtggaatttgcaagtggagatttcagccgctttgaagtcaaagtagaaaaggaaatatcttcctataaaaactagacagaatcattcccacaaactgcgttgtgatgtgttcgttcaactcacagagtttaaactttctgttcatagagcagttaggaaacactctgtttgtaaagtctgcaagtggatattcagacctccttgaggccttcgttggaaacgggatttcttcatattctgctagacagaagaattctcagtaacttccttgtgttgtgtgtattcaactcacagagttgaacgatcctttacagagagcagacttgaaacactctttttgtggaatttgcaagtggagatttcagccgctttgaggtcaatagtagaaaaggaaataacttcgtagaaaaactagacagaatgattctcagaaactcctttgtgatgtgtgtgttcaactcacagagtttaacctttcttttcatagagcagttagtaaacactctgtttataaagtctgcaagtggattttcagacccctttgaggccttcgttggaaacgggatttcttcatattatgctagacagaagaattcccagtaacttccttgtgttgtgtgtgttcaactcacagagttgaactttgatttacacagagcagatttgaaacactctttttgtggaatttgcaagtggagatttcaagcgctttgaggccaaaggcagaaaaggaaataccttcgtataaaaactagacagaatcattctcagaaactgctctgtcatgtgtgcgttcaactctgagagtttaaattttcttttcattcagcagtttggaaacactctgtttgtaaagtctgcacgtggatattttgaccacttagaggccttcgttggaaacgggtttttttcatgtaaggctagacagaagaattcccagtaacttccttgtgttgtgtgcattcaactcacagagttgaacgttcccttagacagagcagatttgaaacactctatttgtgcaatttgcaagtgtagttttcaagctcttttaggtcaacggcagaaaaggaaatatcttggtttcaaaactagacagaatcattcccacaaactgcgttgtgatgtgttcgttcaactcacagagtttaacctttctgttcatagagcagttaggaaacactctgtttgtaaagtctgtaagtggatattctgacatctggtggccttcgttgggaacgggatttcttcatattctgctagacagaagaattctcagtaacttccttgtgttgtgtgtattcaactcacagagttgaacgatcctttacacagagcagacttgaaacactctttttgtggaatttgtaagtggagatttcagccgctttgaggtcaatggtagaataggaaatatcttcctatagaaactagacagaatgattctcagaaactcctttgtgatgtgtactttcaactcacagagtttaacctttcttttcatagagcagttaggaaacactctgtttgtaaagtctgcaagtggatattcagacctctttgaggccttcgttggaaacgggtttttttcatataaggctagacagaagaattctcagtaacttccttgtgttgtgtgtattcaactgacagagttgaactttcatttagagagagcagatttgaaacactgtttttgtggaatttgcaagtggagatttcaagcgctttggggccaaaggcagaaaaggaaatatcttcggataaaaactagacagaatcattctcagaaactgctgcgtgatgtgtgtgttcaactctcagagtttaacttttcttttcattcagcggtttggaaacacactgtttgtaaagtctgcacgtggatattttgaccacttagaggccttcgttggaaacgggttttttgcatgtaaggctagacagaagaattcccagtaacttccttgtgttgtgtacattcaactcacagagttgaacgttccccttagacagagcagatttgaaacactctttttgtgcaattggcaagtggagatttcaagcgctttaaggtcaatggcagaaaaggaaatatcttcgtttcaaaactagacagaatgattctcagaatctcctttgtgatgtgtgcgttcaactcacagagtttaacctttcttttcatagagcagttaggaaacactctgtttgtaaagtctgcaagtggatattcagacatccttgaggctttcgttggaaacgggatttcttcatattctgtttgaaagaagaattctcagtaacttccttgtgttgtgtgtattcaagtcacagagttgaacgatcctttacacagagcagacttgaaacactctttttgtggaatttgcaagtggagatttcagccgctttgaggtcaatggtagaataggaaatatcttcctatagaaactagacagagtgattctcataaactcctttgtgatgtgtgcgttcaactcacagagtttaacctttcttttcatagagcagttaggaaacactctgtttgtaaagtctgcaagtggatattcagacctccttgaggccttcgttggaaacgggatttcttcatattctgctagactgaagaattctcagtaacttccttgtgttgtgtgtattcaactcacagagttgaacgatcctttacacagagcagacatgaaacactctttttgtggaatttgcaagtggagatttcagccgctttgaggtcaatggtagaataggaaatatcttcctatagaaactagacagaatgattctcagaaactcctttgtgatgtgtgcgttcaactcacagagttcaacctttcttttcatagagcagttaggaaacactctgtttgtaaagtctgcaagtggatattcagacctctttgaggccttcgttggaaacgggatttcttcatattatgctagacagaagaattctcagtaacttccttgtgttgtgtgtattcaactcacagagttgaacttccatttacacagagcagatttgaaacactctttttgtggaatttgcaagtggagatttcaagcgctttgaggccaaaggcagaaaaggaaatatcttcgtttcaaaactagacagaatcattctcagaaactgctctgcgatgtgtgcgttcaactctcagagtttaacttttcttttcattcagcagtttggaaacactctgtttgtaaagtctgcacgtggataatttgaccacttagaggccttcgttggaaacgggtttttttatgtaaggctagacagaagaattcccagtaacttccttgtgttgtgtacattcaactcacagagttgaacgttcccttagacagagcagatttgaaacactctttttgtgcaattggcaagtggagatttcaagcgctttgaggtcaatggcagaaaaggaaatatcttcgtttcaaaactagacagaatcattcccaaaaactgcgttgtgatgtgttcgttcatctcacagagtttaacctttcttttcatagagcagttaggaaacagtctgtttgaaaattctgtaagtggatattctgacatcttgtggccttcgttggaaacgggatttcttcatattctgctagacagaagaattctcagtaacttccttgtgttgtgtgtattcaactcacagagttgaacgatcctttacacagagcagacttgaaacactctttttgtggaatttgcaagtggagatttcagccgctttgaggtcaatagtagaaaaggaaatatcttcgtaggaaaactagacagaatgattctcagaaactcctttgtgatgtgtgcgttcaactcaaagagtttaacttttcttttcatagagcagttaggaaacactctgtttgtaaagtctgcaagtggatattcagacctctttgaggccttcgttggaaacgggatttcttcatattatgctagagagaagaattctcagtaacttccttttgttgtgtgtattcaactgacagagttgaactttcatttagacagagcagatttgaaacactctttttctggaatttgcaggtggagatttcaagcgctttgaggccgaaggcagaaaaggaaatatcttcgtataaaaactagacagaatcattctcagaaactgctctgcgatgtgtgccttcagcgctcagagtttaacttttcttttcattcagcagtttggaaacactctgtttgtaaagtctgcacgtggatattttgaccacttagaggccttcgttggaagcgggtttttgtcatgtaaggttagacagaagaattcccagtaacttccttgtgttgtgtgcattcaactcacagatttgagcgttcccttagacagagcagatttaaaacactctatttgtgcaatttgcaagtgtagatttcaagcgctttaaggtcaatggcagaaaaggaaatatcttcgtttcaaaactagacagaatcattcccacaaactgcgttgtgaggtgttccgtaaactcacagagtttaacctttcttttcatagagcagttaggaaacagtctgtttgtaaattctgtaagtggatattctgacatcttgtggccttcgttggaaacgggatttcttcatattctgctagacagaagaattctcagtaacttccttgtgttgtgtgtattcaactcacagagttgaacgatcctttacacagagcagacttgaaacactctttttgtggaatttgcaaatggagatatcagccgctttgaggtcaatggtagaataggaaatatcttcctatagaaactagacagaatgattctcagaaactcctttgtgatgtgtgcgttcaactcacagagtttaacctttcttttcatagagcagttaggaaacactctgtttgtaaagtctgcaagtggatattcagacctccttgaggctttcgttggaaacgggatttcttcatattctgctagaaagaagaattcccagtaacttccttgtgttgtgtgtgttcaactcacagagttgaactttcatttacacagagcagatttgaaacactctttttgtggaatttgcaagtggagatttcaagcgatttgaggccaaaggcagaaaaggaaatatcttcgtttcaaaactagacagaatcattctcagaaactgctctgcgatgtgtgcgttcaactctcagagtttaacttttcttttcattcagcagtttgaaaacactctgtttgtaaagtctgcacgtgtatattttgaccacttagaggccttcgttggaaacgggtttttttcctgtaaggctagacagaagaattcccagtaacttcccttgtgttgtgtgcattcaactcacagagttgaacgttcccttagacagagcagatttgaaacactctatttgtgcaatttgcaagtgtagttttcaagctctttaaggtcaacggcagaaaaggaaatatcttcgtttcaaaactagacagaatcattctcacaaactgcgttgtgatgtgttcgttcatctcacagagtttaacctttcttttcatagagcagttaggaaacagtctgtttgtaaattctgtaagtggatattctgacatcttgtggccttcgttggaaacgggatttcttcatattctgctagacagaagaattctcagtaacttccttgtgttgtgtgtattcaactcacagagttgaacgatcctttacactgagcagacttgaaacattctttttgtggaatttgcaagtggagatttcagccgctttggggtcaatggtagaataggaaatatcttcgtagaaaaactagacagaatgattctcagaaacttctttgtgatgtgtgcgttcaactcacagagtttaacctttcttttcatggagcagttaggaaacactctgtttgtaaactctgcaagtggatattcagacctctttgaggccttcgttggaaacgggatttcttcatactatgctagacagaagacttctcagtaacttccttgtgttgtgtgtattcaactcacagagttgaacgatcctttacacagagcggacttgaaacactctttttgtggaatttgcaagtggagatttcagccgcgttgaggtcaatggtagaaaaggaaatatcttcttataaaaactagacagaatgattctcagaatctcctttataatgtgtgcgttcaactcacagagtttaacctttcttttcataaagcagttaggaaacactctgtttgtaatgtctgcaagtggatattcagacctctttgaggccttcgttggaaacgggatttcttcatattctgctagacagaagaattcccagtaacttccttgtgttgtgtgtgttcaactcacagagttgaactttcatttacacagagcagatttgaaacactctttttgtggagtttgcatgtggagatttcaagcactttgaggccaaaggcagaaaaggaaatatcttcgtataaaaactagacagaatcattctcagaaactgctgcgtgatgtgtgtgttcaaccctcagagtttaactttccttttcattcagcggtttggaaacactctgtttgtaaagtctgcacgtggatattttgaccacttagaggccttcgttggaaacgggtttttttcatgtaaggctagacagaagaattcccagtaacttccttgtgttgtgtgcattccactcacagagttgaacgttcccttagacagagcagatttgaaacactctatttgtgcaatttgcaagtgtagatttcaagctctttaaggtcaatggcagaaaaggaaatatcttcgtttcaaaactagacagaatcattcccacaaactgcgttgtgatgtgttcgttcaactcacagagtttaacctttctgttcatagagcagttaggaaacactctgtttgtaaagtctgtaagtggatattctgacattttgtggccttcgttggaaatgggatttcttcatattctcctagacagaagaattctcagtaacttccttgtgctgtgtgtattcaactcacagagttgaacgatcctttacacagagcatacttgaaacactcttcctgtggaatttgcaactggagatttcagccgctttgaggtcaatggtagaataggaaatatcttcgtataaaaactagacagaatgattctcagaaactcctttgtgatgtgtgtgttcaactcacagagtttaacctttcttttcatagagcagttagtaaacactctatttataaagtctgcaagtggatattcagacccctttgaggccttcgttggaaacgggatttcttcatattatgctagacagaagaattctcagtaacttccttgtgttgtgtgtattcaactgacagagttgaactttcattttgagagagcagatttgaaatactgtttttgtggaatttgcaagtggagatttcaaacgctttggggccaaaggcagaaaaggaaatatcttcgtataaaaactagacagaatcattctcagaaactgctgtgtgatgtgtgcgttcaactctcagagtttaacttttcttttcattcagcggtttggaaacactctgtttgtaaagtctgcacgtggatattttgatcacttagaggccttcgttggaaacgggattttttcatgtaaggctagacagaagaattcccagtaacttccttgtgttgtgtgcattcaactcacagagttgaacgttcccttagacagagcagatttgaaacactctatttgtgcaatttgcaagtgtagatttcaagcgctttaatgtcaatggcagaaaaggaaatatcttcgtttcaaaactagacagaatgattctcagaaacccctttgtgatgtgtgcgttcaactcacagagtttaacctttctgttcatagagcagttaggaaacactctgtttgtaaagtctgtaagtggatattctgacatgcttgtggccttcgttggaaacgggatttcttcatattctgctagacagaagaattctcagtaacttccttgtgttgtgtgtattcaactcacagaattgaacgatcctttacacagagcagacttgaaacactctttttgtggaatttgcaagcggagatttcagccgctttggggtcaatggtagaaaaggaaatatcttcgtataaagactagacagaatgattctcagaaactcctttgtgatgtgtgcgttcaactcacagagtttaacctttcttttcatagagcagttaggaaacactctgtttgtaaagtctgcatgtggatattcagacctctttgaggccttcgttggaaacgggtttttttcatataaggctagacagaagaattctcagtaacttccttgtgttgtgtgtattcaactgacatagttgaactttcatttagagagagcagatttgaaactctgtttttgtggaatttgcaagtggagatttcaagcgctttggggccaaaggcagaaaaggaaatatcttcgtataaaaactagacagaatcattctcagaaactgctctgcgatgtgtgccgttcaactctcagagtttaacttttcttctcattcagcagtttggaaacactctgtttgtaaagtctgcacgtggataatttgaccacttagaggccttcgttggaaacgggtttttttcatgtaaggctagacagaagaattcccagtaacttcccttgtgttgtgtgcattcaactcacagagttgaacgttcccttagacagagcagatttgaaacactctatttgtgcaatttgcaagtgtagttttcaagctctttaaggtcaacggcagaaaaggaaatatcttcgtttcaaaactagacagaatgattctcagaaactcctttgtgatgtgtgagttcaactcacagagtttatcctttcttttcatagagcagttaggaaacactctgtttgtaaagtctgcaagtggatattcagacctctttgaggccttcgttggaaacgggatttcttcatattctgctagacagaagaattctcagtaacttccttgtgttgtgtgcattgaactcacagagttgaacgatcctttacacagggcagacttgaaacactctttttgtggagtttgcaagcggagatttcagcctctttgaggttaatggtagaaaatgaaatatcttcgtatagaaactagacagaatgattctcagaaactcctttgtgatgtgtgcgttcaactcacagagtttaacctttcttttcacagagcagttaggaaacactctgtttgtaaagtttgcaagtggatattctgacatccttgaggccttcgttggaaacgggatttcttcatattatgctacacagaagaattctcaataacttccttgtgttgtgtgtattccaatcacagagttgaacgatcctttacacagagcagacttgaaacactgtttttgtggaatttgcaagtggagatttcagccgctttgaggtcaatggttgaaaaggaaatatcttccaatagaaatttgacagaatgattctcagaaactcctttgtgatgtgtgcgttcaactcacagagtttaacctttcttttcatagagcagttaggaaacactctgtttgtaaagtctgcaagtggatattcagacatctttgaggccttcgttggaaacgggatttcttcatattatgttagacagaagaattctcagtaactttcttgtgttgtgtgtattcaactgacagagttgaactttcatttagagagagcagatttgaaacactgtttttgtggaatttgcaagtggagatttcaagcgctttggggccaaaggcagaaaaggaaatatcttcgtataaaaactggacagaatcattctcagaaactgctgcgtgatgtgtgcgttcaactctcagagtttaacttttcttttcattcagcggtttggaaacactctgtttgtaaagtctgcacgtggatattatgaccacttagaggccttcgttggaaacgggttttcttcatgtaaggctagacagaagaattcccagtaacttccttgtgttgtgtgcattcaactcacagagttgaacgttcccttagacagagcagatttgaaacactccatttgtgcaatttgcaagtgtagatttcaagcgctttaaggtcaatggcagaaaaggaaatatcttcgtttcaaaactagacagaatcattcccacaaactgcgttgtgatgtgttcgttcaactcacagagtttaacctttcttttcatagagcagttaggaaacactctgttggtaaattctgtaagtggatattctgacatcttgtggccttcagtggaaacgggattttttcatattctgctagacagaataattctcagtaacttccttgtgttgtgtgtattcaactcccagagttgaacgatcctttacacagagcagacttgaaacattctttttgtggaatttgcaagtggagatttcagccgctttgaggtcaatggtagaataggaaatatcttcctatagaaactagacagaatgattctgagaaactcctttgtgatgtgtgcgttcaactcacagagtttaacctttcttttcatagagcagttaggaaacactctgtttgtaaagtgtgcaagtggatattcagacctccttgaggccttcgttggaaacgggatttcttcatattatgctagacagaagaattcccagtaacttccttgtgttgtgtgtgttcaactcacagagttgaactttcatttacacagagcagatttgaaacactctttttgtggaatttgcaaatggagatttcaagcgctttcaggccaaaggcagaaaaggaaatatcttcgtataaaaactagacagaatcattctcagaaactgctgcgtgatgtgtgcgttcaactctcagagtttaacttttctttacattcagcggtttggaaacactctgtttgtaaagtctgcacgtggaaattttgaccacttagaggccttcgttggaaacgggtttttttcatgtaaggctagacagaagaattcccagtaacttccttgcgttgtgtacattccactcacagagttgaacgttcccttagacagagcagatttgaaacactctttttgtgcaattggcaagtggtgatttcagccgctttgaggtcaatggtagaaaaggaaatatcttcgtataaaaactagacagaatcattcccacaaactgcgttgtgatgtgttcgttcaactcacagagtttaacctttctgttcatagagcagttaggaaacactctgattgtaaagtctgtaagtggatattctgacatcttgtggccttcgttggaaacgggatttcttcatattctgctagacagaagaattctcagtaacttccttgtgttgtgtgcattcaactcacagagttgaatgatcctttacacagagcacattagaaacactctttttgtggaatttgcaagtggagatttcagccgctttgaggtcaatggcagaaaaggaaatatcttcgtataaaaactagacagaatgattctcagaaactcctttgtgatgtgtgcgttcaactcacagagtttaacctttcttttcatagagcagttaggaaacactctgtttgtaaagtctgcaagtggatattcagacctctttgaggctcttcgttggaaacgggtttttttcatataaggctagacagagcaattctcagtaacttccttgtgttgtgtgtattcaactgacagagttgaactttcatttagagagagcagatttgaaacactgtttttgtggaatttgcaagtggagatttcaagcgctttggggccaaaggcagaaaaggaaatatcttcgtataaaaactagacagaatcattctcagaaactgctgcgtgatgtgtgcgttcaactctcagagtttaacttttcttttcattcagcggtttggaaacactctgtttgtaaagtctgcacgtggatattttgaccacttagaggcctttgttggaaacgggtttttttcatgtaaggctagacagaagaattcccagtaacttccttgtgttgtgtgcattcaactcacagagttgaacgttcccttagacagagcagatttgaaacactctatttgtgcaatttgcaagtgtagatttcaagcgctttaaggtcaatggcagaaaaggaaatttcttcgtttcaaaactagacagaatgattctcagaaaatcttttgtgatgtgtgcgttcaactcacagagtttaacttttcttctcatagagcagttaggaaacattctgtttgtaaagtgtgcaagtggatattcagacttctttgaggccttcgttggaaacgggatttcttcatattatgctagacagaataattctcagtaacttccttgtgttgtgtgtattcaactcacagagttgaaggatcctttacagagagcaggcttgaaacactctttttgtggaatttgcaagtggagatttcagccgctttgaggtcaatggtagaataggaaataccttcttatagaaactagacagaatgattctcagaaactcctttgtgatgtgtgcgttcaactcacagagtttaacctttctgttcatagagcagttaggaaacactctgtttgtaaagtctgcaagtggatattcagacctccttgattccttcggtggaaacgggatttcttcatattatgctagacagaagaattctcagtaacttccttgtgttgtgtgtattcaactcacagagttgaacgatcctttacagagagcagacttgaaacactctttttgtggaatttgtaagtggagatttcagccgctttgaggtcaatggttgaaaaggaaactatcttcgtataaagactagacagaatgattctcagaaactcctttgtgatgtgtgcgttcaactcacagagtttaacctttcttttcatagagcagttaggaaacactctgtttgtaaagtctgcaagtggatattcagacctctttgaggccttcgttggaaacgggtttttttcatataaggctcgacagaagaattctcagtaacttccttgtgttgtgtgtattcaactgaaagagttgaactttcatttagagagagcagatttgaaacactgtttttgtggaagttgcaagtggagatttcaagcgctttggggccaaaggcagaaaaggaaatatcttcgtataaaaactagacagaatcattctcagaaactgctgcgtgatgtgtgcgttcaactctcagagtttaacttttcttttcattcagccgtttggaaacactctgtttgtaaagtctgcacgtggatattttgaccacttaggggccttcgttggaaacgggttttttgcatgtaaggctagacagaagaattcccagtaacttccttgtgttgtgtgcattcaactcacagagttgaacgttcccttagacagagcagatttgaaacactctatttgtgcaatttgcaagtgtagatttcaagcgctttaaggtcaacggcagaaaaaggaaatatcttcgtttcaaaactagacagaatcattcccacaaactgcgttgtgatgtgttcgttcaactcacagagtttaacctttcttttcatagagcagttaggaaacagtctgtttgtcaattctgtaagtggatattctgacatcttgtggccttcgttggaaacgggatttcttcacattctcctagacagaagaattctcagtaacttccttgtgttgtgtgtattcaactcacagagttgaacgatcctttacacagagcagacttgtaacactctttttgtggaatttgcaagtggagatttcagccgctttgaagtcaaatgtagaaaaggaaatatcttcctataaaaactagacagaatgattctcagaaacttctttgtgatgtgtgtgttcaactcacagagtttaacctttcttttcatagagcagttaggaaacactctgtttgtaaactctgcaagtggatattcagacctctttgaggacttcgttggaaacgggtttttttcatataaggctagacagaagaattcccagtaactttccttgtgttgtgtgtgttcaactcacagagttgaactttcagttacacagagcagatttgaaacactctttttgtggactttgcaaatggagatttcaagcgctttgaggccaaaggcagaaatggaaatatgcttcgtataaaaactagacagaatcattctcagaaactgctctgcgatgtgtgcgttcaagtctcagagtttaacttttcttttcattcagcagtttggaaacactctctttgtaaagtctgcaggtggatattttgaccacttagaggccttcgttggaaacgggtttttttcctgtaaggctagacagaagaattcccagtaacttccttgtgttgtgtgcattcaactcacagagttgaacgttcccttaggcagagcagataggaaacactctatttgtgcaatttgcaagtgtagatttcaagcgctttaaggtcaacggcagaaaaggaaatatcttcgtttcaaaactagacagaagaattctcagtaacttccttgtgttgtgtgtattcaactcacagagatgaacgatcctttacacagagcagacttgaaacactctttttgtggaatttgcaactggagatttcagccgctttgaggtcaatagtagaaaaggaaataacttcgtagaaaaactagacagaatgattctcagaaactcctttgtcatgtgtgtgttcaactcacagagtttaacctttcttttcatagagcagttagtaaacactctgtttataaagtctgcaagtggatattcagacccctttgaggccttcgttggaaacgggatttcttcatattatgctagacagaagaattcccagtaacttccttgtgttgtgtgtgttcaactcacacagttgaactttcgtttacacagagcagatttgaaacactctttttgtggaatttgcaaatggagatttcaagcgctttgaggccaaaggcagaaaaggaaatatcttcgtataaaaactagacagaatcattctcaaaaactgctctgcgatgtgtgcgttcaactctcagagtttaacttttcttttcattcagcagtttggaaacactctgtttgtaaagtctgcacgtggatattttgaccacttagaggccttcgttggaaacgggtttttttcctgtaaggctagacagaagaattcccagtaacttccttgtgttgtgtacattcaactcacagagttgaacgttcccttagacagagcagatttgaaacactctttttgtgcaattggctaatggagatttcaagcgctttaaggtcaatggcagaaaaggaaatatcttcgtttcaaaactagacagaatcattcccacaaactgcgttgtgatgtgttcgttcaactcacagagttgaacctttcttttcatagagcagttaggaaacagtctgtttgtcaattctgtaagtggatattctgacatcttgtggccttcgttggaaacgggatttcttcatattctgctagacagaagaattctcagaatcttccttgtgttgtgtgtattcaactcacagagttgaacgatcctttacacagagcagacttgaaacactctttttgtggaatttgcaagtggagatttcagccgctttgaagtccatggtagaaaaggaaatatcttcgtataaaaactagacagaatgattctcagaaactcctttgtgatgtgtgcgttcaactcacagagtttaacctttctgttcatagaggtgttaggaaacactctgtttgtaaagtctgcaagtggatattcagacctccttgaggccttcgttggaaacgggatttcttcatattctgctagacagaagaattctcagtaacttccttgtgttgtgtgtattcaactgacagagttgaactttcatttagagagagcagatttgaaacactgtttttgtggagtttgcaagtggagatttcaagcgctttggggccaaaggcagaaaaggaaatatcttcgtataaaaactagacagaatcattctcagaaactgctgcgtgatgtgtgcgttcaactctcagagtttaacttttcttttcattcagcggtttggaaacactctgtttgtaagtctgcacgtggatattttgaccacttagaggctttcgttggaaacgcgtttttttcatgtaaggctagacagaagaattcccagtaacttccttgtgttgtgtgcattcaactcacagtgttgaacgttcccttagacagagcagatttgaaacactctatttgtgaatttgcaagtgtagatttcaagcgctttaaggtcaatggcagaaaaggaaatatcttcgtttcaaaactagacagaatcattcccacaaactgcgttgtgatgtgttcgttcaactcacagagtttaacttttctgttcatagagcagttaggaaacactctgtttgtaaagtctgaaagtggatattctgacatcttgtggccttcgtttgaaacgggatttcttcatattctgctagacagaagaattctcagtaacttccttgtgttgtgtgtattcaactcacagagttgaacgatcctttacacagaacagacttgtaacactctttttgtggaatttgcaagtggagatttcagccactttgaagtcaaaggtagaaaaggaaataacttcctataaaaactagacagaatgattctcagaaactcctttgtgatgtgtgcgttcacctcacagagtttaacttttcttttcatagagcagttaggaaacactctgtttgtaaagtctgcaagtgtatattcagacctctttgaggccttcgttggaaacgggatttcttcatattatgctagacagaagaattcccagtaacttccttgtgttgtgtgtgttcaactcacagagttgaactttcatttacacagagcagatttgaaacactctttttgtggaatttgcaagtggagatttcaagcgctttgaggccaaaggcagaaaaggaaatatcttcgtttgaaaactacacagaatcattctcagaaactgctgcgtgatgtatgcgttcaactctcagagtttaacttttcttttcattcagcggtttggaaacactctgtttgtaaagtctgcacgtggatattttgaccacttagaggccttcgttggaaacgggtttttttcatgtaaggctagacagaagaattcccagtaacttccttgtgttgtgtgcattccactcacagagttgaacgttcccttagacagagcagatttgaaacactctatttgtgcaatttgcaagtgtagatttcaagcgctttaaggtcaatggcagaaaaggaaatatcttcgtttcaaaactagacagaatcattcccacaaactgcgttgtgatgtgttcggttcaactcacagagtttaacctttctgttcatagagcagttaggaaacactctgtttgtaaagtctgtaagtggatattctgacatcttgtggccttcgttggaaacgggatttcttcatattatgctagaaagaagaattctcagaaacttccttgtgttgtgtgttttcaactcacagagttgaacgatgctttacacagagtagacttgaaacactctttttgtgtaatttgcaagtggagatttcagccgcattgaggtcaatggtagaaaaggaaatatcttcgtttaaaaactagacagaataattctcagaaacttcattgtgatgtgtgcgttcaactcacagagtttaacctttcttttcatagagcagttaggaaacactgtttgtaaactctgcaagtggatattcagacctctttgaggccttcgttggaaacgggatttcttcatactgtgctagacagaagaattctcagtaatttccttgtgttgtgtgtattcaactcacagagttgaacgatcctttacacagagcagacttgaaacactcttcttgcggaatttgcaagtggagatttcagccgctttgaggtcaatggtagaataggaaatatcttcctatagaaactagacagaatgattctcagaaactcctttgtgatgtgtgcgttcaactcacagagtttaacctttcttttcatagagcagttgggaaacactctgtttgtaaagtctgcaagtggatattcagacctctttgaggccttcgttggaaacgggatttcttcatattctgctagacagaagaattcccagtaacttccttgtgctgtgtgtgttcaactcacagagttgaactttcatttacacagagcagatttgaaacactctttttgtggaatttgcaagtggagatttcaagcgctttgaggccaaaggcagaaaaggaaatatcttcgtataaaaactagacagaatcatgctgagaaactgctctgcgatgtgtgcgttcaactctcagagtttaacttttcttttcattcagcagtttggaaacactctgtttgtaaagtctgcacgtgcataatttgaccgcttagaggccttcgttggaaacgggtttttttcatgtaaggctagacagaagaattcccagtaacttccttgtgtagtgtgcattcaactcacagagttgaacgttcccttagacagagcagatttgaaacactatatttgtgcaaattgcaagtgtagatttcaagtgatttaaggtcaatggcagaaaaggaaatatcttcgtttcaaaactagacagaatcattcccacaaactgcgttgtgatgtattcgttcaactcacagagtttaacctttctgttcatagagcagttaggaaacactctgtttgtaaagtctgcaagtggatattcagacctctttgaggccttcgttggaaacgggatttcttcatattatgctagacaaaagaattctcagtaacttccttgtgttgtgtgtattcaactcacagagttgaaggatcctttacacagagcagacttgaaacactctttttgtggaatttgcaagtggagatttcagccgctttgaggtcaatggtagaataggaaatatcttcctatagaaactagacagaatgattctgagaaactcctttgtgatgtgtgcgttcaactcacagagtttaacctttcttttcatagagcagttaggaaacactctgtttgtaatgtgtgcaagtggatattcagacctccttgaggccttcgttggaaacgggatttcttcatattatgctagacacaagaattctcagtaacttcattgtgttgtgtgttttcaactgacagagttgaactttcatttagagagagcagatttgtaacactgtttttgtggaatttgcaagtggagatttcaagcgctttggggccaaaggcagaaaaggaaatatcttcgtataaaaactagacagaatcattctcagaaactgctctgcgatgtgtgcgttcaactctcagaatttaacttttcttttcattcagcagtttggaaacactctgtttgtaaagtctgcacgtggataatttgaccacttagaggccttcgttggaaacgggtttttttcatgtaaggctagacagaagaattcccagtaacttccttgtgttgtgtacattcaactcacagagttgaacgtttccttagacagagcagatttgaaacactctttttgtgcaattggcaagtggagatttcaagcgctttgaggtcaatggcagaaaaggaaatatcttcgtttcaaaactagacaaaatcattcccacaaactgcgttgtgatgtgttcgttcaactcacagagtttaacctttctgttcatagagcagttaggaaaaactctgtttgtaaagtctgtaagtagatattctgacatcttgtggccttctttggaaaagggatttcttcatattctgctagacagaagaattctcagtaactttccttgtgttgtgtttattcaactcacagagttgaatgatcctttacacagagcagacttgaaacactctttttgtggaatttgcaagtggagatttcagccgctttgaggtcaatggtagaaaagtaaatatcttcctataaagactagacagaatgattctcagaaactcctttgtgatgtgtgtgttcaactcacagagtttaacctttcttttcctagagcagttagtaaacactctgtttataaagtctgcaagtggatattcagacccctttcaggccttcgttggaaacgggatttcttcatattatgctagacagaagaattcccagtaacttccttgtgttgtgtgtgttcaactcacagagttgaactttcatttacacagagcagatttgaaacactctttttgtggaatttgcaagtggagatttcaagcgctttgaggccaaagcagaaaaggaaatatcttcgtttcgaaactagacagaatcattctcagaaaatgctctgtgatgtgtacgttcaactctcagagtttaacttttgttttcattcagcagtttggaaacactctgtttgtaaagtctgcacgtggatattttgaccacttagaggccttcgttggaaacgggtttttttcatgtaagggtagacagaagaattctcagtaacttccttgtgttgtgtgtattcaactcacagagttgaacgatcctttacacagagcagacttgtaacactctttttgtggaatttgcaagtggagacttcagccgctttgaagtcaaaggtagaaaaggaaatatcttcctataaaaactagacagaatcattcccacaaactgcgttgtgatgcgttcgttcaactcacatagtttaacctttctgttcatagagcagttaggaaacactctgtttgtaaagtctgcaagtggatattcagacctccttgaggccttcgttggaaacgggatttcttcatattctgctagacagaagaattctcagtaacttccttgtgttgtgtgtattcaactcacagagttgaacgatcctttacacagagcagacttgaaacactcgatttgtggaatttgcaagtggagatttcagccgctttgaggtcaatggtagaaaaggaaatatcttcgtataaaaactagacagaacgattctcagaaactcctttgtgatgtgtgtgttcaactcacagagtttaacctttcttttcatagagcagttagtaaacactctgtttataaagtctgcaagtggatattcagacccctttgaggccttcgttggaaacgggatttcttcatattatgctagacagaagaattctcagtaacttccttgtgttgtgtgtattcaactcacagagtcgaacgatcctttacgcagagcagacttgaaacactctttttgtggaatttgcaagtggagatttcagccgctttgaggtcaatggtagaaaaggaaatatcttcgtataaagactagacagaatgattctcagaaactcctttgtgatgtgtgcgttcaactcacagagtttaacctttcttttcatagagcagttaggaaacactctgtttgtaaagtctgcaagtggatattcagacctctttgaggccttcgttggaaacgggatttcttcatattctgctagagagaagaattctcagtaacttccttgtgttgtgtgtattcaactgacagagttgaactttcatttagagagagcagatttgaaacactgtttttgtggaatttgcaaatggagatttcaagcgctttggggccaaaggcagaaaaggaaatatcttcctataaaaactagacagaatcattctcagaaactgctgcgtgatgtgtgcgttcaactctcagagtttaacttttcttttcattcaacggtttggaaacactctctttgtaaagtctgcacgtggaaattttgaccacttagaggccttcgttggaaacgggtttttttcatgtaaggctagacagaagaattcccagtaacttccttgtgttgtgtgcattcaactcacagagttgaacgttcccttagacagagcagatttgaaacactctatttctgcaatttgcaagtgtagttttcaagctctttaaggtcaacggcagaaaaggaaatatcatcgtttcaaaactagacagaatcattcccacaaactgcgttgtgatgttttcgttcaactcacagagtttaacctttcttttcatagagcagttaggaaacagtctgtttgtcaattctgtaagtggatattctgacatcttgtggccttcgttggaaacgggatttcttcatattctgctagacagaagaattctcagaatctttccttgtgttgtgtgtattcaactcacagagttgaacgatcctttacacagagcagacttgaaacactctttttgtggaatttgcaagtggagatttcagccgctttgaagtccatggtagaaaaggaaatatcttcgtataaaaactagacagaatgattctcagaaactcctttgtgatgtgtgcgttcaactcacagagtttaacctttcttttcatagagcagttaggaaaccctctgtttgtaaagtctgcaagtggatattcagacctctttgaggccttcgttggaaacgggatttcttcatattctgctagacagaagaattctcagaatcttccttgtgttgtgtgtattcaactcacagagttgaacgatcctttacacagagcagacttgaaacactctttttgtggaatttgcaagtggagatttcagccgctttgaggtccttggtagaaaaggaaatatcttcgtataaaaactagacagaatgattctcagaaactcctttgtgatgtgtgcgttcaactcacagagtttaacctttcttttcatagagcagttaggaaacactctgtttgtaaagtctgcaagtggatattcagacctctttgaggccttcgttggaaacgggtttttctcatataaggctagacagaagaattctcagtaacttccttgtgttgtgtgtattcaactgacagagttgaactttcatttagagacagcagatttgaaacactgtttttgtggaatttgcaagtggagatttcaagcgctttggggccaaaggcagaaaaagaaatatcttcgtataaaaactagacagaatcattctcagaaactgctgcgtgatgtgtgcgttcaactctcagagtttaacttttcttttcattcagcggtttggaaacactctgtttgtaaagactgcacgtggatattttgaccccttagaggccttcgttggaaacgggtttttttcatgtaaggctagacagaagaattcccagtaacttccttgtgttgtgtgcattcaactcacagagttgaacgtacccttagacagagcagatttgaaacactctatttgtgcaatttccaagtgtagatttcaagcgctttaaggtcaacggcagaaaaggaaatatcttcgtttcaaaactagacagaatcattcccacaaactgcgttgtgatgtgttcgctcaactcacagagtttaacctttctgttcatagagcagttaggaaacactctgtttgtaaagtctgtaagtggatattctgacatccttgtggccttcgttggaaacgggatttcttcatattctgctagacagaagaattctcagtaacttccttgtgttgtgtgtattcaactcacagagttgaacgatgatttacacagagcagacttgaaactctctttttgtggaatttgcaactggagatttcagccgctttgaggtcaatggtagaataggaaatatcttcctatagaaactagacagaatgattctcagaaactcctttgtgatgtgtgcgttcaactcacagagttcaacctttcttttcatagagcagttgggaaacactctgtttgtaaagtctgcaagtggatattcaaacttctttgaggccttcgttggaagcgggatttcttcatattctgctagacggaagaattcccagtaacttccttgtgttgtgtgtgttcaactcacagagttgaactttcatttaaacagagcagatttgaaacactctttttgtggaatttgcaaatggagatttcaagcgctttgaggccaaaggcagaaaaggaaatatcttcgtttcaaaactagacagaatcattctcagaaactgctctgtgatgtgtgcgttcaactctcagagtttaacttttcttttcattcagcagtttggaaacactctgtttgtaaagtctgcacgtggataatttgaccacttagaggccttcgttggaaacggttttttttcatgtaaggctagacagaagaattcccagtaacttcctggtgttgtgtacattcaactcacagagttgaacgttcccttagacagagcagatttgaaacactctttttgtgcaattggcaaatggagatttcaagcgctttaaggtcaatggcagaaaaggaaatatcttcgtttcaaaactagacagaatcattcccacaaactgcgttgtgatgtgttcgttcaactcacagagtttaacctttctgttcatagagcagttaggaaaaactctgtttgtaaagtctgtaagtggatattctgacatcttgtggccttcgttggaaacgggatttcttcatattctgctagacagaagaattctcagtaacttccttgtgttgtgtgtattcaactcacagagttgaacgatcctttacacagagcagacttgaaacactctatttgtagaatttgcaagtggagatttcagccgctttgaggtcagtagtagaaaaggaaatatcttcgtggaaaaactagacagaatgattctcagaaactcctttgtgatgtgtgcgttgaactcacagagtttaacttttcttttcatagagcagttaggaaacactatgtttgtaaagtctgcaagtggatattcagacctctttgaggccttcgttggaaacgggatttcttcacattctgctagacagaagaattctcagtaacttccttgtgttgtgtgtattcaactcacagagttgaacgatcctttacacagagcagacttgaatcactctttttgtggaatttgcaaatggagatttcagccgctttgaggtcaatagtagaaaaggaaatatcttcgtagaaaaactagacagaatcattctcagaaactgctctgcgatgtgtgcgttcaactctcagagtttaacttttcttttcattcagcagtttggaaacactctgtttttaaagtctgcacgtggatattttgaccacttagaggccttcgttggaaacgggtttttttcctgtaaggctagacagaagaattcccagtaacttccttgtgttgtgtgcattcaactcacagcagttgaacgttcccttagacagagcagatttgaaacactctatttgtgcaatttgcaagtgtagatttcaagcgctttaaggtcaatggcagaaaaggaaatattttcgtttcaaaactagacagaatcattcccacaaactgcgttgtgatgtgttcgttcaactcacagagtttaacctttctgttcatagagcagttaggaaacactctgtttgtaaactctgtaagtggatattctgacatcttgtggccttcgttggaaacgggatttcttcacattctgctagacagaagaattctcagaaacttcccttgtgttgtgtgttttcaactcacagagttgaacgatcctttacacagagcagacttgaaacactccttttgtggaatttgcaagtggagatttcagccgctttgaggtcaatggtagaataggaaatatcttcctatagaaagtagacagaatgattctcagaaacttcattgtgatgtgtgcgttcaactcacagagtttaacctttcttttcatacagcagttaggaaacactctgtttgtaaactctgcaagtcgatattcacacctctttgaggccttcgttggaaacgggatttcttcatactgtgctagacagaagaattctcagtaacttccttgtgttgtgtgtattcaactcacagagttgaacgatcctttacacagagaggacttgaaacactctttttgtggaatttgcaagtggagatttcagccgcgttgaggtcaatggtagaaaaggaaatatcttcgtataaaaactagacagaatcattctcagaaagtgctctgcgatgtgtgcgttcaactctcagagtttaactttgcttttcattcagcagtttggaaacactctgtttgtaaagtctgcacgtggataatttgaccacttagaggccttcgttggaaacgggtttttttcatgtaaggctagacagaagaattcccagtaacttccttgtgttgtgtacattcaactcacagagttgaacgttcccttagacagagcagatttgaaacactctttttgtgcaattggaaagtggagatttcaagcgctttaaggtcaatggcagaaaaggaaatatcttcgtttcaaaactagacagaatcattcccacaaactgcgttgtgatgtgttcgttcaacacacagagtttaacctttcttttcatagagcagttaggaaacagtctgtttgtcaattctgtaagtggatattctgacatcttgtggccttcgttggaaacgagatttcttcatattctgctagacagaagaattctcagtaactaccttgtgttgtgtgtattcaactcacagagttgaacgatcctttacacagagcggacttgaaacactcgttttgtggaatttgcaagtggagatttcagccgcgttgaggtcaatggtagaaaaggaaatatcttcgtataaaaactagacagaatgattctcagaaactcctttgtgatgtgtgcgttcaactcacagagttcaacctttcttttcatagagcagttaggaaacactctgtttgtaaagtctgcaagtggatattcagacttctttgagtccttcgttggaagcgggatttcttcatgttctgctagacagaagaattctcagtaacttccttgtattgtgtgtattcaactcacagagttgaacgatcctttacacagagcagacttgaaacaatctttttgtggaatttgcaagtggagatttcagccgctttgaggtcaatggtagaataggaaatatcttcctatagaaactagacagagtgattctcagaaactcctttgtgatgtctgcgttcaactcacagagtttaaccttccttttcatagagcagttaggaaacactctgtttgtaaattctgcaagtggatattcagacctccttgaggccttcgttggaaacgggatttcttcatattctgctatacagaagaattctcagaaacttccttgtgttgtgtgttttcaactcacagagttcaacgatccattacacagagtatacttgaaacactctttttgtggaattggcaagtggagatttcagccgctttgaggtcaatggtagaaaaggaaatatcttcgtataaaaactagacagaatcattctcagaaactgctctgtgatgtgtgcgttcaactctcagagtttaacttttcttttcattcagcagtttggaaacactctgtttgtaaagtctgcacgtggatattttgaccacttagaggccttcgttggaaaagggatttcttcatatgatgctagacagaagaattcccagtaacttccttgtgttgtgtgcattcaactcacagagttcaacgttcccttagacagagcagatttgaaacactctatttgtgcaatttgcaagtgtagatttcaagcgctttaaggtcaatggcagaaaaggaaatatcttcgtttcaaaactagacagaatcattcccacaaactgcgttgtgatgtgttcgttcaactcacagagtttaacctttctgttcatagagcagttaggaaacactctgtaaagtctgtaagtggatattctgacatcttgtggccttcgttggaaacgggatttcttcatattctgctagacagaagaattctcagtaacttccttgtgttgtgtgtattcaactcacagagttgaacgatcctttacacagagcagacttgtaaccctctttttgtggaatttgcaagtggagatttcagccgctttgaagtcaaaggtagaaaaggaaatatcttcctataaaaactagacagaatgattctcagaaaatcttttgtgatgtgtgcgttcaactcaaagagtttaacttttcttctcatagagcagttaggaaacactctgtttgtaaagtctgcaagtggatattcagacctctttgaggccttcgttggaaaagggatttcttcatattatgctagacagaagaattctcagtaacttccttgtgttgtgtgtgttcaacacacagagttgaactttcatttacacagagcagatttgaaacactctttttgtggaatttgcaagtggagatttcaagcgctttgaggccaaaggcagaaaaggaaatatcttcgtttcaaaactagacagaatcattctcagaaactgctgcgtgatgtgtgcgttcaactctcagagtttaacttttcttttcattcagcggtttggaaacagtctgtttgtaaagtctgcacgtggatattttgaccacttagaggccttcgttggaaacgggttttttgcatgtaaggctagacagaagaattcccagtaacttccttgtgttgtgtacattcaactcacagagttgaacattcccttagacagagcagatttgaaacactctttttgtgcaattggcaaatggagatttcaagcgctttaaggtcaatggcaggaaaggaaatatcttcgtttcaaaactagacagaatgattctcagaaactcctttgtgatgtgtgcgttcaactcacagagtttaacctttcttttcatagagcagttaggaaacactctgtttgtaaagtctgcaagtggatattcacacctctttgaggccttcgttggaaacgggatttcttcatattatgctagacagaagaattctcagtaacttccttgtgttgtctgtattcaactcacagagttgaacgatcctttacacagagcagacttgaaacactctttttgtggaatttgcaagtggagatttcagccgctttgaggtcaatggtagaataggaaatatcttcctatagaaactagacagaatgattctcagaaactcctttgtgatgtgtgcgttcaagtcacagagtttaacctttcttttcatagagcagttaggaaacactctgtttgtaaagtctgcaagtggatattcagacctccttgaggctttcgttggaaacgggatttcttcatattctgctagacagaagaattctcagtaacttccttttgttgtgtgtattcaactgacagagttgaactttcatttacacagagcagatttgaaacactctttttgtggtatttgcaagtggagatttcagccgctttgatgtcaatgatagaaaaggaaatatcttcatataaaaattagacagaatgattctcagaaacttctttgtgatgtgtgcgttcaactcacagagttttacctttcttttcatagagcagttaggaaacactctgtttgtaaagtctgcaagtggatattcagacctctttgaggccttcgttggaaacgggatttcttcatactatgctagacagaagatttcccagtaacttccttgtgttgtgtgtgttcaactcacagagttgaactttcatttacacagagcagatttgaaacactctttttgtggaatttgcaaatggagatttcaagcgctttgaggccaaaggcagaaaaggaaatgccttcgtttcaaaactagacagaatcattctcagaaactgctctgcgatgtgtgcgttcaactctcagagtttaacttttctttccattcagcagtttggaaacactctggttgtaaagtctgcacgtggataacttgaccacttagaggccttcgttggaaacgggtttttttcctgtaaggctagacagaagaattcccagtaacttccttgtgttgtgtgcattcaactcacagagatgaacgttcccttagacagagcagatttgaaacattctatttgtgcaatttgcaagtgtagatttcaagcgctttaaggtcaatggcagaaaaggaaaaatcttcgtttcaaaactagacagaatgattctcagaaaatcttttgtgatgtgtgcgttcaactcacagagtttaacttttcttctcatagagcagttaggaatcactctgtttgtaaactctgcaagtggatattcagacctctttgaggccttcgttggaaacgggatttcttcacattctgctagacagaagaattctcagtaacttccttgtgttgtgtgtattcaactcacagagttgaacaatcctttacacagagcagacttgaaacactctttttgtggaatttgcaagtggagatttcaggcgctttgaggtcaatggtagaaaaggaaacatctccgtataaagactagacagaatgattctcagaaactcctttgtgttgtgtgcgttcaactcacagagtttaacctttcttttcatagagcagttaggaaacactctgtttgtaaagtctgcaagtggatattcagacatctttgaggctttcgttggaaacgggatttcttcatattctgctagacagaagaattctcagtaacttccttgtgttgtgtgtattcaactcacagagttgaacgatcctttacatagagcagtcttgaaacgctctttttgtggaatttgcaagtggagatttcagccgctttgaggtcaatagtagaaaaggaaatatcttcgtagaaaaactagacagaatgattctcagaaactcctttgtgatgtgtgcgttcaacacacagagtttaacctttcttttcatagagcagttcggaaacactctgtttgtaaagtctgcaagtggatattcagacttctttgaggccttcgttggaaacgggatttcttcttattctgctagacagaagaattctcagtaacttccttgtgttgtgtgtattcaactcacagagttgaatgatcctttacacagagcagacttgaaactctctttttctggaatttgcaagtggagatttcagccgctttgaggtcaatggtagaaaagtaaatatcttcgtataaagactagacagaatgattctcagaaactcctttgtgatgtgtgcgttcaactcacagagtttaacttttcttttcatagagcagttaggaaacactctgtttgtaaagtctgcaagtggatattcagacctctttgaagccttcgttggaaacgggatttcttcatattatgctagacagaagaattctcagtaacttccttgtgttgtgtgtattcaactgacagagttgaactttcattttgagagagcagatttgaaacactgtttttgtggaatttgcaagtggagatttcaagcgcttttgggccaaaggcagaaaaggaaatatcttcgtataaaaactagacagaatcattctcagaaactgctgcgtgatgtgtgcgttcaactctcagagtttaacttttcttttcattcagcggtttggaaacactctgtttgtaaagtctgcaagtggatattttgaccacttagaggccttcgttggaaacgggattttttcatgtaaggctagacagaagaattcccagtaacttccttgtgttgtgtgcattcaactcacagagttgaacgttcccttagacagagcagatttgaaacactctatttgtgcaatttgcaagtgtagatttcaagcgcattaaggtcaatggcagaaaaggaaatatcttcgtttcaaaattagacagaatcattcccacaaactgcgttgtgatgtgttcgttcaactcacagagtttaacctttccgttcatagagcagttaggaaacactctgtttgtaaagtctgtaagaggatattctgacatcttgtggccttcgttggaaacgggatttcttcatattctgctagacagaagaattctcagtaacttccttctgttgtgtgtattcaactcacagagttcaacgatcctttacacagagcagacttgaaacactctttttgtggaatttgcaagtggagatttcagccgctttgaggtcaatggtagaaaaggaaatatcttcgtataaaaactagacagaatgattctcagaaacttctttgtgatgtgtgtgttcaactcacagagtttaacctttcttttcatagagcagttaggaaacactgtgtttttaaactctgcaagtggatattcagacctatttgaggccttcgttggaaacgggatttcttcatactgtgctagacagaagaattctcagtaacttccttgtgttgtgtgtattcaactcacagagttgaacgatcctttacacagagcagacttgaaacactctttttgtggaatttgcaagtggagatttcaagcgctttgaggccaaaggcagaaaaggaaatatcttcgtttaaaaactagacagaatcattctcagaaactgctctgcgatgtgtgcgttcaactctcagagtttaacttttcttttcattcagcagtttggaaacactctgtttgtaaagtctgcacgtggatattttgaccacttagaggccttcgttggaaacgggtgtttttcctgtaaggctagacagaagaattcccagtaacttccttgttttgtgtacattcaactcacagagttgaacgttcccttagatagagcagatttgaaacactctttttgtgcaattggcaagtggtgatttcaaccgctttgaggtcaatggtagaaaaggaaatatcttcgtataaaaactagacagaatgattcccacaaactgcgttgtgatgtgttcgtacaactcacagagtttaacctttctgttcatagagcagttaggaaacactctgtttgtaaagtctgtaagtggatattcagaactctttgaggtcttcgttggaaacgggatttcttcatattctgctagacagaagaattctcagtaacttccttgtgttgtgtgtattctactcacagagttgaacgatcctttacacagagcagtcttgaaacactctttttgtggaatttgcaagtggagatttcagccgctttgaggtcaatagtagaaaaggaaatatcttcgtagaaaaactagacagaatgattctcagaaactcctttgtgacgtgtgcgttcaactcacagagtttaacctttcttttcatagagcagttaggaaacactctgtttgtaaagtctgcaagtggatattcagacctccttgaggccttcgttggaaacgggatttcttcatattctgctagacagaagaattcccagtaacttctttgtgttgtgtgtgttcaactcacagagttgaactttcatttacacagagcagatttgaaacactctttttgtggaatttgcaagtggagatttcaagcgctttgaggccaaaggcagaaaaggaaatatcttcgtataaaaactagacagaatcattctcagaaactgctctgcgatgtgtgcgttcaactctcagagtttaacttttcttttcattcagcagtttggaaacactctgtttgtaaagtctgcacgtggatattttgaacacttagaggccttcgttggaaacgggtttttttcctgtaaggctagacagaagaattcccagtaacttccttgtgttgtgtgcattcaactcacagagttgaacgttcccttagacagagcagatttgaaacactctatttgttcaatttgcaagtgtagatttcaagcgctttaaggtcaatggcagaaaaggaaatatcttcgtttcaaaactagacagaatcattcccacaaacagcgttgtgatgtgttcgttcaactcacagagtttaacctttctgttcagagagcagttaggaaacactctgtttgtaaagtctgaaagtggatattcagacatcttgtggccttcgttggaaacgggatttcttcatattctgctagacagaagaattctcactaacttccttgtgttgtgtgtattcaactcacagagttgaacgatcctttacacagagcagacttgaaacactctttttgtggaatttgcaagtggagatttcagccgctttgaggtcaatagtagaaaaggaaatatcttcgtagaaaaactagacagaatgattctcagaaactcctttgtgatgtgtgtgttcaactcacagagtttaacctttcttttcatagagcagttaggaaacactctgtttgtaaagtctgcaagtggatattcagacctcgtttgaggccttcgttggaaactggatttcttcatattctgctagacagaagaattctcagtaacttccttgtgttgtgtgtattcaactgacagagttgaactttcatttagagagagctgatttgaaacactgtttttgtggaatttgcaagtggagatttcaagcgctttggggccaaaggcagaaaaggaaataccttcgtataaaaactagacagaatcattctcagaaactgctctgcgatgtgtgtgttcaactctcagagtttaacttttcttttcattcagcagtttggaaacactctgtttgtaaagtctgcacgtggatattttgaccacttagaggccttcgttggaaacgggtttttttcatgtaaggctatacagaagaattcccagtaacttccttgtgttgtgtacattcaactcacagagttgaacgttcccttagacagagcagatttgaaatactctttttgtgcaattggcaagtggagatttcaagcgctttaaggtcaatggcagaaaaggaaatatcttcgtttcaaaactagacagaatcattcccacaaactgcgttgtgatgtgttcgttcaactcacagagtttaacctttctgttcatggagcagttaggaaacactctgtttgtaaagtctgtaagtggatattctgacatcttgtggccttcgttggaaacgggatttcttcatattctgctagacggaagaattctcagtaacttccttgtgttgtgtgtattcaactcacagagttgaacgatcctttacacagagcagacttgaaacaccctttttgtggaatttgcaagtggagatttcagccgctttgaggtcaatagtagaaaaggaaatatcttcgtagaaaaactagacagaatgattctcagaaactccttagtgatgtgtgcgttcaactcacagagtttaacttttcttttcatagagcagttaggaaacactctgtttgtaaagtctgcaagtggatattcagacctctttgaggccttcgttggaaacgggatttcttcatattctgctagacagaagaattctcagtaacttccttgtgttgtgtgtattcaactcacagagttgaacgatcctttacacagagcaatcttgaaacattctttttgtggaatttgcaagtggagatttcagccgctttgaggtcaatggtagaataggaaatatcttcctatagaaactagacagaatcattctcagaaactgctctgcgatgtgtgcgttcaactctcagagtttaacttttcttttcattcagcagtttggaaacactctgtttgtaaagtctgcacgtggatattttgaccacttagaggccttcgttggaaacgggttttcttcctgtaaggctagacagaagaattcccagtaacttccttgtgttgtgtacattcaactcacagagttgaacgttcccttagacagagcagatttgaaacactctttttgtgcaattggcaagtggtgatttcagctgctttggggtcaatggtagaaaagggaatatcttcgtataaaaactagacagaatgattctcagaaactcctttgtgatgtgtgcgttcaactcacagagtttaacctttcttttcatagagcagttaggaaacactctgtttgtaaagtctgcaagtggatattcagacctctttgaggccttcgttggaaacgggatttcttcatattctactagacagaagaattctcagtaacttccttgtgttgtgtgtattcaactcacagagttgaacgatcctttacacagagcaaacttgaaacactcttcttgtggaatttgcaagtggagatttcagccgctttgaggtcaattgtagaataggaaatatcttcctatagaaactagacagaatgattctcagaaactcccttgtgatgtgtgcgttcaactcacagagttttagctttcttttcatagagcagttaggaaacactctgtttgtaatgtctgcaagtggatattcagacctctttgaggccttcattggaaacgggatttcttcatattatgctagacacaagaattctcagtaacttgccttgtgttgtgtgtattcaactcacagagttgaacgatcctttacacagagcagacttgaaacactctttttgtggaatttgcaagtggagatttcagccgctttgaggtcaatggtagaataggaaatatcttcctattgaaactagacagaatgattctcagaaacgcctttgtgatgtgtgtgttcaactcacagagtttaacctttcttttcatagagcagttaggaaacactctgttggtaaagtctgcaagtggatattcagacctctttgaggccttcgttggaaacgggatttcttcatactgtgctagacagaagaattctcagtaacttccttgtgttgtgtgtattcaactcacagagttgaacgatcctttacacagagcggaattgaaacactctttttgtgtaatttgcaagtggagatttcagccgcgttgaggtcaatggtagaaaaggaaatctcttcgtataaaaactagacagaatcactctcagaaactgctctgcgatgtgtgcgttcaactctcagagtttaacttttcttttcattcagcagtttggaaacactctgtttgtaaagtctgcacgtggatattttgacctctcagaggtcttcgttggaaacgggtttttttcctgtaaggctagacagaagaattcccagtaacttccttgtgttgtgtacattcaactcacagagttgaacgttcccttagacagagcagatttgaaacactctttttgtgcaattggcaaatggagatttcaagcgctttaaggtcaatggcaggaaaggaaatatcttcgtttcaaaactagacagaatgattctcataaactcctttgtgatgtgtgcattcaactcacggagtttcacctttcttttcatagagcagttaggaaacactctgtttgtaaagtctgtaagtggatattctgacatcttgtggccttcgttggaaacgggatttcttcatattctgctagacagaagaattctcagtaacttccttgtgttgtgtgtattcaactcacagagttgaacgatcctttacacagagcatacttgaaacactcttcttgtggaatttgcaaatggagatttcagccgctttgaggtccatggtagaataggaaatatcttcctatagaaactagacagaatgattctcagaaactcctttgtgatgtctgcgttcaactcacagagtttaacctttcttttcatagagcagttaggaaacactctgtttgtaaagtctggaagtggatattcagacctccttgaggccttcgttggaaacgggatttcttcatattatgctagatagaagaattctcagtaacttccttgtgttgtgtgtattcaactgacagagttgaactttcatttagagagagcagatttgaaacactgtttttgtggaatttgcaagtggagatttcaagcgctttggggccaaaggcagaaaaagaaatatcttcgtataaaaactagacagaatcattctcagaaactgctctgtgatgtgtgcgttcaactctcagagtttaacttttcttttcattcagcagtttggaaacaatctgtttgtaaagtctgcacgtggatattttgaccacttagaggccttcgttgaaaacgggtttctttcatgtaaggggagacagaagaattcccagtaacttccttgtgttgtgtgcattcaactcacagagttgaacgttcccttagacagagcagatttgaaacactctatttgtgcattttgcaagtgtagatttcaagcgctttaaggtcaatggcagaaaaggaaatatcttcgtttcaaaactagacagaatcattcccacaaactgcgttgtgatgtgttcgttcaactcacagagtttaacctttcttttcatagagcagttaggaaaaattctgtttgtaaattctgtaagtggatattctgtaatcttgtggccttcgttggaaacgggctttcttcatattctgctagacagaagaattctcagtaacttccttgtgttgtgtgtattcaactcacagagttgaacgatcctttacacagagcagacttgaaacactctttttgtggaatttgcaagtggagatttcagccgcgttgaggtcaatggtataaaaggaaatatcttcgtataaaaactagacagaatgattctcagaaactcctttgtgatgtgtgcgttcaactcacagagtttaacctttcttttcatagagcagttaggcaacactctgtttgtaaactctgcaagtggatattcagacctctttgaggccttcgatggaaacgggatttcttcatactatgctggagagaagaattctcagtaacttccttgtgttgtgtgtattcaactcacagagttgaacgatcctttacacagagcagacttgaaacactctttttgtggaatttgcaagtggagatttcagccgctttgaggtcaatggaagaaaaggaaatatcttcgtataaaaactagacagaatcattctcagaaactgctctgcgatgtgtgcgttcaactctcagagtttaacttttcttttcattcagcagtgtggaaacactctgtttgtaaagtctgcacgtggatattttgaccacttagaggccttcgttggaaaagggtttttttcctgtaaggctagacagaagaattcccagtaacttcccttgtgttgtgtacattcaactcacagagttgaacgttcccttagacagagcagatttgaaacactctttttgtgcaattggcaagtggagattacaagcgctttaaggtcaatggcagaaaaggaaatatcttcgtttcaaaactagacagaatcattcccacaaactgcgttgtgatgtgttcgttcaactcacagagtttaacctttctattcatagagcagttaggaaacactctgtttgtaaagtctgtaagtggatattctgacatcttgtggcatttgttggaaacgggatttcttcatattctgctagacagaataattctcagtaacttccttgtgttgcgtgtattcaactcacagagttgaacgatcctttacagagagcagacttgaaacactctttttgtggaatttgcaagtggagatttcagccgctttgaggtcaatgatagaataggaaatatcttcctatagaaactagacagaatgattctcagaaactcctttgtgttgtgagcgttcaactcacagagtttaacctttcttttcatagagcagttaggaaacactctgtttataaagtctgcaagtggatattcagacccctttgaggccttcgttggaaacgggatttcttcatattatgctagacagaagaattctcagtaacttccttgtgttgtgtgtattcaactgacagagttgaactttcatgtagagagagcagatttgaaacactgtttttgtggaatttgcaagtggagatttcaagcgctttggggccaaaggcagaaaaggaaatatcttcgtataaaactagacagaatcattctcagaaactgctctgtgatgtgtgcgttcaactctcagagtttaacttttcttttcattcagcagtttggaaacactctgtttgtaaagtctgcacgtggataatttgaccacttagaggccttcgttggaaacgggtttttttcatgtaaggctagacagaagaattcccagtaacttccttgtgttgtgtgcattcaactcacagagttgaacgttcccttagacagagcagatttgaaacactctatttgtgcaatttccaagtgtagttttcaagctctttgaggtcaacggcagaaaaggaaatatcttcgtttcaaaactagacagaatcattcccacaaactgcgttgtgatgtgttcgttcaactcacagagattaacctttcttttcatagagcagttaggaaacactctgtttgtaaattctgtaagtggatattctgacatcttgtggcctttgttggaaacgggatttcttcatattctgctagacacaagaattctcagtaacttccttgtgttgtgtgtattcaactcacagagttgaacgatcctttacagagggcagacttgaaacactctttttgtggaatttgcaagtggagatttcagccgttttgaggtcaatggtagaaaaggaaatatcttcgtataaagactagacagaatgattctcagaaactcctttgtgatgtgtgcgttcaactcacagagtttaacttttcttttcatagagcagttaggaaacactctgtttgtaaagtctgcaagtggatattcagacctctttgaggccttcgatagaaacgggatttcttcatattctgctagacagaggaattctcagtaacttctttgtgttgtgtgtattcaactcacagagttgaacgatcctttacacagagcagacttgaaacactctttttgtggaatttgcaattggagatttcagccgctttgagttcaagggtagaataggaaatatcttcctatagaaactagacagaatgattctcagaaactcctttgtgatgtgtgcgttcaactcacagagttcaacctttcttttcatagagcagttgggaaacactctgtttgtaaagtctgcaagtggatattcagacttctttgagaccttcgttggaagcgggatttcttcatattctgctagacagaataattctcagtaacttccttgtgttgtgtgtattcaactcacagagttgaacgatcctttacacagagcagacttgaaacattctttctgtggaatttgcaagtggagatttcagccgctttgaggtcaatggtagaataggaaatattttcctatagaaactagacagaatgattctcagaaactcctttgtgatgtgtgcgttcaactcacagagtttaacttttcttttcatagagcagttaggaaacactctgtttgtaaagtctgcaagtggatattcagacctctttgaggccttcgttggaaacgggatttcctcatattatgctagacagaagaattctcagtaacttccttgtgttgtgtgtattcaactgacagagttgaactttcatttagagagagcagatttgaaacactgtttttgtggaatttgcaagtggagatttcatgcgctttggggccaaaggcagaaaaggaaatatcttcgtataaaaactagacagaatcattctcagaaagtgctctgcgatgtgtgcgttcaactctcagagtttaactttgcttttcattcagcagtttggaaacactctgtttgtaaagtctgcacgtggataatttgaccacttagaggccttcgttggaaacgggtttttttcatgtaaggctagacagaagaattcccagtaacttccttgtgttgtgtacattcaactcacagagttgaacgttcccttagacagagcagatttgaaacactctttttgtgcaattggcaaatggagatttcaagcgctttaaggtcaatggcagaaaaggaaatatattcgtttcaaaactagacagaatcattcccacaaactgcgttgtgatgtgttcgttcaactcacagagtttaacgtttccgttcatagagcagttaggaaacacactgtttgtaaagtctgtaagtggatattctgacatcttgtggccttcgttggaaacgggatttcttcatattctgctagacagaagaattctcagtaacttccttgtgttgtgtgtattcaactcacagagttgaacgatcctttacacagagcagacttgaaacactctttctgtggaatttgcaagtggagatttcagccgctttgaggtcaatagtagaaaaggaaatgtcttcgtagaaaaactagacagagtgattctcagaaactcctttgtgatgtctgcgtttaactcacagagtttaacctttcttttcatagagcagttaggaaacactctgtttgtaaagtctgcaagtggatattcagacctccttgaggccttcgttggaaacgggatttctccatattatgctggacagaagaattctcagtaactttcttgtgttgtgtgtattcaactgacagagttgaactttcatttagagagaccagatttgaaacactgtttttgtggaatttgcaagtggagatttcaagcgctttggggccaaaggcagaaaaggaaatatcttcgtataaaaactagacagaatcattctcagaaactgctgcgtgatgtgtgcgttcacctctcagagtttaacttttcttttcattcagcggtttggaaacactctgtttgtaaagtctgcacgtggaaattttgaccacttagaggccttcgttggaaacgggtttttttcatgtaaggctagacagaagcaattcccaggaacttccttgtgttgtgtacattcaactcacagcagttgaacgttcccttagacagagcagatttgaaacactctttttgtgcaattggcaagtggtgatttcagccgctttgaggtcaatggtagaaaaggaaatatcttcgtataaaaactagacagaatcattcccacaaactgcgttgtgatgtgttcgttcaactcacagagtttaacctttctgttcatagagcagttaggaaacactctgtttgtaaagtctgccagtggatattcagacctccttgaggccttcgttggaaacgggatttcttcatattctgctagacagaagaattctcagaatcttccttgtgttgtgtgtattcaactcacacagttgaacgatggtttacacagagcagatttgaaacactctttttgtggaatttgcaagtggagatttcagccgctttgaggtcaatggtagaaaaggaaatatcttcgtataacaactagacagaatgattctcataaactcctttgggatgtgtgcgttcaactcacagagtttaacctttcttttcatagagcagttaggaaacactctgtttgtaaagtctgcaagtggatattcagacctctttgaggccttcgttggaaacgggatttcttcatattctgctagacagaagaattcccagtaacttccatgtgttgtgtgtgttcaactcacagagttgaactttcatttacacagagcagatttgaaacactctttttgtggaatttgcaaatggagatttcaagcgctttgaggccagaggcagaaaaggaaatatcttcgtataaaaactagacagaatcactctcagaaactgctctgtgatgtgtgcgttcaactctcagagtttaacttttcttttcattcagcagtttggaaacactctgtttgtaaagtctgcacgtggatattttgaccacttagaggccttctttggaaacgggtttttttcatgtaaggatagacagaagaattcccagtaacttccttgtgttgtgtgcattcaactcacagagatgaacgttcccttagacagagcagatttgaaacactctatttgtgcaatttgcaagtgtagatttcaagggctttaaggtcgatggcagaaaaggaaatatcttcgtttcaaaactagacagaatgattctcagaaactcctttgtgatgtgtgcgttcaactcacagagtttaacctttcttttcatagagcagttaggaaacactctgtttgtaaagtctgcaagtggatattcagacatctttgaggccttctttggaaacgggatttcttcatgttctgctagacagaagaattctcagaaacttccttgtgttgtgtgttttcaactcacagagttgaacgatgctttacacagagtagacttgaaacactctttttgtgtaatttgcaagtggagatttcagccgctttgagagtcaatggtagaaaaggaaatatcttcgtataaaaactaggcagaatgattctaagaaacttctttgtgatgtgtgcgttcaactcacagagtttaacctttcttttcatagagcagttaggaaacactctgtttgtaaactctgcaagtggatattcagacctctttgaggccttcgttggaaacgggatttctccatactgtgcgagacagaagaattctcggtaacttccttgtgttgtgtgtattcaactgacagagttgaaatttcatttagagagagcagatttgaaacactgtttttgtggaatatgcaagtggagatttcaagcgctttggggccaagggcagaaaaggaaatatcttcgtataaaaactagacagaatcattctcagaaactgctgcgtgatgtgtgcgttcaactctcagagtttaacttttcttttcattcagcggtttggaaacactctgtttgtaaagtctgcacgtggatattttgaccacttagaggccttcgttggaaacgggttttttttcatgtaaggctagacagaagaattcccagtaacttccttgtgttgtgtacattcaactcacagagttgaacgttcccttagacagagcagatttgaaacactctttttgtgcaattggcaagtggagatttcaagcgctttgaggtcaatggcagaaaaggaaatatcttcgtttcaaaactagacagaatcattcccacaaactgcattgtgatgtgttcgttcaactcacagagtttaacctttcttttcatagagcagttaggaaacagtctgtttgtaaattctgtaagtggatattctgacatcttgtggccttcgttggaaacgggatttcttcatattctgctagacagaagaattctcagtaacttccttgtgttgtgtgtattcaactcacggagttgaacgatcctttacacagagcagacttgaaacactctttttgtggaatttgcaagtggagatttcagccgctttgaggtctatagtagaaaaggaaatatcttcatagaaaaactagacagaatgattctcagaaactcctttgtgatctgtgcgttcaactcacagagtttaacctttcttttcatagagcagttaggaaacactctgcttgtaaagtctgcaagtggatattcagccctctttgaggccttcgttggaaacgggtttttttcatataaggctagacagaagaattctcagtaacttccttgtgttgtgtgtattcaactcacagagttgaacgatcctttacacatagcagacttgaaacactctttttgtggaatttgcaagtggagatttcagccgctatggggtcaatggtagaataggaaatatcttcctatagaaactagacagaatgattctcagaaactcctttgtgatgtgtgcgttcaactcacagaatttaacatttcctttcatagagcagttaggaaacactctgtttgtaaagtctgcaagtggatattcagacctctttgaggccttcgttggaaacgggatttcttcatattctgctagacagaagaattcccagtaacttccttgtgttgtgtgtgttcaactcacagagttgaactttcatttacacagagcagatttgaaacactctttttgtggaatttgcaagtggagatttcatgcgctttgaggccaaaggcagaaaaggaaatatcttcgtataaaaactagacagaatcattctcagaaactgctctgcgatgtgtgcgttcaactctcacagtttaacttttcttttcattcagcagtttggaaacactctgtttgtaaagtctgcacgtggataatttgaccacttagaggccttcgttggaaacgggtttttttcatgtaaggctagacagaagaattcccagtaacttccttgtgttgtgtgcattcaactcacagagttcaacgttcccttagacagagcagatttgaaacactctatttgtgcaatttgcaagtgtagatttcaagcgctttaaggtcaacggcagaaaaggaaatatcttcgtttcaaaactagacagaatcattcccacaaactgcgttgtgatgtgttagttcaactcacagagtttaacctttcttttcatagagcagttaggaaacagtctgtttgtcaattctgtaagtggatattctgacatcttgtggccttcgttggaaacgggatttcttcatattctgctagacagaagaattctcagtaacttccttgtgttgtgtgtattcaactcacagagttgaacgatcctttacacagagcagacttgaaacactctttttgtggatttgcaagtggagatttcagccgctttgaggtcaatggtagaatagtaaatatcttcctgtagaaacaagagagaatgattctcagaaactcctttgtgatgtgtgcgttcaactcacagagtttaacctttcttttcatagagcagttaggaaacactctgtttgtaaagtctgcaagtggatattcagacctctttgaggccttcgttggaaacgggaattcttcatattatgctagacagaagaattcccagtaacttccttgtgttgtgtgtgttcaactcacagagttgaactttcatgtacacagagcagatttgaaacactctttttgtggaatttgcaagtggagatttcaagcgctttgaggccaaaggcagaaaaggaaatatcttcgtataaaaactagacagaatcattctcagaaactgctctgcgatgtgtgcgttcaactctaagagtttaacttttcttttcattcagcagtttggaaacactctgtttgtaaagtctgtacgtggataatttgaccacttagaggccttcgttggaaaagggtttttttcatgtaaggatagacagaagaattcccagtaacttccttgtgttgtgtacattcaactcacagagttgaacgttcccttagacagagcagatttgaaacactctttttgtgtaattggcaagtggagatttcaagcgctttaaggtcaatggcagaaaaggaaatatcttcgtttcaaaactagacagaatcattcccacaaactgcgttgtgatgtgttcgttcaactcacagagtttaacctttcttttcatagagcagttaggagacactctgtttgtaatgtctgcaagtggatattcagacctctttgaggccttcgttggaaacgggatttcttcatattatgctacacagaagaattctcagtaacttccttgtgttttgtgaattcaactcacagagttgaacgatcctatacacagagcagacttgaaacactctttttgtggaatttgcaagtggagatttcagccgctttgtggtcaatagtagaataggaaatatcttcctatagaaactagacagaatgattctcagaaactcctttgtgatgtgtgcgttcaactcacagagtttaacctttctgttcatagagcagttaggaaacactctatttgtaaagtctgcaagtggatattcagacctctttgaggccttcgttggaaacgggatttcttcatattctgctagacagaagaattctcagtaacttccttgtgttgtgtgtattcaactgacaagagttgaactttcatttggagagagcagatttgaaacactgtttttgtggaatttgcaagtggagatttcaagcgctttggggccaaaggcagaaaaggaaatatcttcgtataaaaactagacagaatcattctcagaaactgctctgcgatgtgtgcgttcaactctcagagtttaactttgcttttcattcagcagtttggaaacactctgtttgtaaagtctgcacgtggataatttgaccacttagaggccttcgttggaaacgggtttttttcatgtaaggctggacagaagaattcccagtaacttccttgtgttgtgtacattcaactcacagagttgaacgttccgttagacagagcagacttgtaacactctttttgtggaatttgcaagtggagttttcagccgcttttaagtcaatggtagaaaaggtaatatcttcctataaaaactagacagaatgattctcagaaactcctttgtgatgtgtgcgttcaactcacagagtttaacctttcttttcatagagcagttaggaaacactctgtttgttaagtctgcaagtggatattcagtcctctttgaggccttcgttggaaacgggatttcttcatattatgctagacagaagaattctcagtaacttcattgtgttgtgtgtattcaactcacagatttcaacgatcctttacacagagcagacttgaaacactctttttgtggaatttgcaagtggagatttcagccgctttgaggtcaatggtagaataggaaatatcttcctatagaaactagacagaatgattctcataaactcctttgtgatgtgtgcgttcaactcacagagtttaacctttcctttcatagagcagttaggaaacactctgtttgtaaagtctgcaagtggatattcagacctccttgaggccttcgttggaaacgggatttcttcatattctgctagacagaagaattcccagtaacttccttgtgttgtgtgtgttctactcacagagttgaactttgatttacacagagcagatttgaaacactctttttgtggaatttggaagtggagatttcaagcgctttgaggccaaaggcagaaaaggaaatatcttcgtataaaaactagacagaatcattctcagaaactgctctgcgatgtgtgcgttgaactctcagagtttaacttttcttttcattcagcagtttggaaacactctgtttgtaaagtctgtacgtggatattttgaccacttagaggccttcgttggaaacgggtttttttcctgtaaggctagacagaagaattcccagtaacttccttgtgttgtgtgcattcaactcacagagttgaacgttcccttagacagagcagatttgaaacactctatttgtgcaatttgcaagtgtagttttcaagctctttaaggtcaacggcagaaaagcaaatatcttcgtttcaaaactagacagaatgattctcagaaactcctttgtgatttgtgcgttcaactcacagagtttaacttttcttttcatagatcagttaggaaacactctgtttgtaaagtctgcaagtggatattcagacctctttgatgccttcgttggaaacgggatttcttcatattatgctagacagaataattctcagtaacttccttgtgttgtgtgtattcaactcacagagttgaacgatcctttagagagagcagacttgaaacactctttttgtggtatttgcaagtggagatttcagccgctttgtggtcaatggtagaaaaggaaactatcatcgtataaagactagacagaatgattctcagaaactcctttgtgatgtgtgtgttcaactcacagagtttaacctttcttttcatagagcagttaggaaacactctgtttgtaaagtctgcaagtggatattcagacctctttgaggccttcgttggaaacgggtttttttcatataaggctagacaaaagaattcccagtaacttccttgtgttgtgtgtgttcaactcacagagttgaactttcatttacacagagcagatttgaaacactctttttgtggaatttgcaaatggagatttcaagcgctttgaggccaaaggcagaaaaggaaatatcctcgtataaaaactagacagaatcattctcagaaactgctctgcgacgtgtgcgttcaactctcagagtttaacttttcttttcattcagcagtttggaaacactctgtttgtaaagtctgcacgtggataatttgaccacttagaggccttcgttggaaacgggtttttttcatgtaaggctagacagaagaattcctagtaacttccttgtgttgtgtacattcaactcacagagttgaacgttcccttagacagagcagatttgaaacactatttttgtgcaattggcaagtggtgatttcagccgctttgaggtcaatggtataaaaggaaatatcttcgtattaaaactagacagaatcattcccacaaactgcgttgtgatgtgttcgttcatctcacagagtttaacctttcttttcatagagcagttaggaaacagtctgtttgtaaattccgtaagtggatattctgacatcttgtggccttcgttggaaacgggatttcttcatattctgctagacagaagaattctcagaaacttccttttgttgtgtgtattcaactcacagagttgaacgatcctttacacagagcagattagaaaaactctttttgtggaatttgcaagtggagatttcagccgctttgaggtcaatggtagaaaagggaatatcttcgtataaaaactagacagaatgattctcagaaactcctttgagatgtgtgcgttcaactcacagagtttaacctttcttttcatagagcagttaggaaacactctgtttgtaaagtctgcaagtggatattcagacctctttgaggccttcgttggaaacgggttttttcatataaggctagacagaagaattctcagtaacttccttgtgttgtgtgtattcaactcacagagttgaactatcctttacacagagcagacttgaaacactctttttgtggaatttgcaagtggagatttcaagcgctttgaggccaaaagcagaaaaggaaatatcttcgtataaaaactagacagaatcattctcagaaactgctgcgtgatgtgtgcgttcaactctcagagtttaacttttcttttcattcagcggtttggaaacactctgtttgtaaagtctgcacgtggatattttgaccacttagaggccttcgttgggaaacgggtttttttcatgtaaggctagacagaagaattcccagtaacttccttgtgttgtgtgtgttcaactcacagagttgaactttcatttacacagagcagatttgaaacactctttttgtggaatttgcaaatggagatttcaagcgctttgaggccaaaggcagaaaaggaaatatcttcgtttcaaaactagacagaatcattcccacaaactgcgttgtgatgtgttcgttcaactcacagagtttaacctttctgttcatagagcagttaggaaacactctgtttctaaagtctgtaagtggatattctgacatcttgtggccttcgttggaaacgggatttcttcatattctgctagacagaagaattctcaataacttccttgtgttgtgtgtattcaactcacagagttgaacgatcctttacacagagcagacttgaaacactcttgttgtggaatttgcaagtggagatttcagccgctttgaggtcaatggtagaataggaaatatcttcctataaaaactagacagaatgattctcagaaactcctttgtgatgtgtgcgttcaactcacagagtttaacctttcttttcatagagcagttaggaaacactctgcttctaaagtatgcaagtggatatttagccctctttgaggccttcgttggaaacgggtttttttcatataaggctagacagaagaattcccagtaacttccttgtgttgtgtgtgttcaactcacagagttgaactttcatttacacagagcagatttgaaacactctttttgtggaatttgcaagtggagatatcaagcgctttgaggccaaaggcagaaaaggaaatatcttcgtataaaaactagacagaatcattctcagaaactgctctgcgatgtgtgcgttgaactctcagagtttaacttttcttttcattcagcagtttggaaacactctgtttgtaaagtctgcacgtggataatttgaccacttagaggccttcgttggaaacgggtttttttcatgtaaggctagacagaagaattcccagtaacttccttgtgttgtgtgcattcaactcacagagttgaacgttcccttagacagagcagatttgaaacactctatttgtgcaatttgcaagtgtagatttcaagcgctttaaggtcaacggcagaaaaaggaaatatcttcgtttcaaaactagacagaatcattcccacaaactgcgttgtgatgtgttcgttcaactcacagagtttaacctttcttttcatagagcagttaggaaacactctgttggtaaattctgtaagtggatattctgacatcttgtggcctccgttggaaacgggatttcttcatattctgctagacagaagaattctcagtaacttccttgtgttgtgtgtattcaactcacacagttgaacgatcctttacacagagcggacttgaaacactcgttttgtggaatttgcaagtggagatttcagccgcgttgaggtcaatggtagaaaaggaaatatcttcgtataaaaactagacagaatgattctcagaaactcctttgtgatgtgtgtgttcaactcacagagtttaacctttcttttcatagagcagttagtaaacactctgtttataaagtctgcaagtggatattcagacccctttgaggccttcgttggaaacgggatttcttcatattctcctagacagaagaattctcagtaacttccttgtgttgtgtgtattcaactgacagagttgaactttcatttggagagagcagatttgaaacactgtttttgtggaatttgcaagtggagatttcaagcgctttggggccaaaggcagaaaaggaaatatcttcgtataaacactagacagaatcattctcagaaactgctctgcgatgtgtgcgttcaactctcagagtttaacttttcttttcattcagcagtttggaaacactctgtttgtaaagtctgcacgtggataacttgaccacttagaggccttcgttggaaacgggtttttttcatgtaaggctagacagaagaattcccagtaacttccttgtgttgtgtacattcaactcacagagttgaacgttcccttagacagagcagatttgaaacactctttttctgcaattggcaaatggagatttcaagcgctttaaggtcaatggcagaaaaggaaatatcttcgtttcaaaactagacagaatgattctcagaaactcctttgtgatgtgtgcgttcaactcacagagttcaacctttcttttcatagagcagttgggatacactctgtttgtaaagtctgcaagtggatattcagacttctttgaggccttcgttggaagcgggatttcttcatattctgctagacagaagaattctcagtaacttcctcgtgttgtgtgtattcaactcacagagttgaacgaacctttacacagagcagacttgaaacactctttttgtggaatttgcaaatggagatttcagccactttgaggtcaatggttgaaaaggaaatatcttcatataaaaattagacagaatgattctcagaaactcctttgtgatgtgtgcgttcaactcacagagttcaacctttcttttcatagagcagttgggaaacactctgtttgtaaagtctgcaagtggatattcagacttctttgaggccttcgttggaagcaggatttcttcatgttctgctagacagaagaattctcagtaacttccttgtgttgtgtgtattcaactcacagagttgaacgatcctttacacagagcagtcttgaaacactctttttgtggaatttgcaagtggagatttctgacgctttgaggtcaatggtagaataggaaatatcttcctatagaaactagacagaatgattctcagaaacttctttgtgatgtgtgcgctcaactcacagagtttaacctttcttttcatagagcagttaggaaacactctgtttgtaaagtcagcaagtggatattcagacctctttgaggccttcgtaggaaacgggatttctgcatattatgctagacagaagaattcccagtaacttccttgtgttgtgtgtgttcaactcacagagttgaactttcatttacccagagcagatatgaaacactctttttgtggaatttgcaagtggagatttcaagcgctttgaggccaaaggcagaaaaggaaatatcttcgtataaaaactagacagaatcattctcagaaactgctctgtgatgtgtgcgttcatctctcagagtttaacttttcttttcattcagcagtttggaaacactctgtttgtaaagtctgcacgtggataatttgatcacttagaggccttcgttggaaacgggtttttttcatgtaaggctagacagaagaattctcagtaacttccttctgttgtgtgtattcaactcacagagttgaacgatcctttacacagagcagacttgtaacactctttttgtggaatttgcaagtggagatttcagccgctttgaagtcaaaggtagaaaaggaaatatcttcctataaaaaatagacagaatgattctcagaaacttctttgtgatgtgtgcgttcaactcacagagtttaacctttcttttcatagagcagttaggaaacactctgtttgtaaactctgcaaatggatgttcagacctctttgaggccttcgttggaaacgggatttcttcatactatgctagacagaagaattctcagtaacttccttgtgttgtgtgtattcaactcacagagttgaaccgatcctttacacagagcagacttgaaacactctttttgtggaatttgcaagtggagatttcagccgctttgaggtcaatggtagaaaaggaaatatcttcctataaaaactagacagaatgattctgagaaactcctttgtgatgtgtgcgttcaactcacagagtttaacctttcttttcatagagcagttaggaaacactctgtttgtaaagtctgcaagtggatattcagacctccttgaggccttcgttggaaacgggttttcttcatattatgctagacagaagaattcccagtaacttccttgtgttgtgtgtgttcaactcacagagttgaactttcatttacacagagcagatttgaaactctctttttgtggaatttacaaatggagatttcaagcgctttgaggccaaaggcagaaaaggaaatatcttcgtataaaaactagacagaatcattctcagaaactgctctgcgatgtgtgcgttcaactctcagagttcaacttttcttttcattcagcagtttggaaacactctgtttgtaaagtctgcacgtggataatttgactacttagaggccttcgttggaaacgggtttttttcatgtaaggctagacagaagaattcccagtaacttccttgtgttgtgtgcgttcaactcacagagttgaactttcatttacacagagcagatttgaaacactctttttgtggaatttgcaaatggagatttcaagcgctttgaggccaaaggcagaaaaggaaatgtcttcgtttcaaaactagacagaatgattctcagaaaatcttttgtgatgtgtgcgttcaactcacagagtttaacctttcttttcatagagcagttaggaaacactctgtttgtaaagtctgcaagtggatattcagacctccttgaggccttcgttggaaacgggatttcttcatattctgctagacagaagaattctcagtaacttaccttgtgttgtgtgtattcaactcacagggttgaacgatcctttacacagagcagacttgaaacactctttttgtggaatttgcaagtggcgatttcagcctctttgaggtcaatggtagaataggaaatatcttcctatagaaactagacagaatgattttcataaactccttagtgatgtgtgcgttcaactcacagagtttaacctttctgttcatagagcaattaggaaacactctgtttgtaaagtctgcaagtggatattcagacccctttgaggccttcgttggaaacgggatttcttcatattatgctagacagaaaaattctcagtaacttccttgtgttgtgtgtattcaactgacagagttgaactttcatttagagagagcagatttgaaacactgtttttgtggaatttgcaagtggagatttcaagcgctttggggccaaaggcagaaaaggaaatatcttcgtataaaaactagacagaatcattctcagaaactgctgcgtgatgtgtgcgttcaactctcagagttcaacttttcttttcattcagcggtttggaaacactctgtttgtaaagtctgcacgtggatattttgaccacttagaggccttcgttggaaacgggttttttcatgtaaggctagacagaagaattcccagtaacttccttgtgttgtgtgcattcaactcacagagttgaacgttcccttagacagagcagatttgaaacactctatttgtgcaatttgcaagtatagatttcaagcgctttaaggtcaatggcagaaaaggaaatatcttcgtttcaaaactagacagaatcattcccacaaactgcgttgtgatgtgttcgttcaactcacagagtttaacctttctgttcatagagcagttaggaaacactctgttgtaaagtctgtaagtggatattctgacatcttgtggccttcgttggaaacgggatttcttcatattctgctagacagaagaattctcagtaacttccttgtgttgtgtgaattcaactcacagagttgaacgatcctttacacagagcagacttgaaacactctttttgtggaatttgcaggtggagatttcagccgctttttgttcaatggtagaataggaaatatcttcctatagaaactagacagaatgattctgagaaactcctttgtgatgtgtgtgttcaactcacagagtttaacctttgctttcatagagcagttagtaaacactctgtttataaagtctgcaagtgaatattcagacccctttgaggccttcgttggaaacgggatttcttcatattatgctggacagaagaattatcagtaacttccttgtgttgtgtgtattcaactcacagagttgaacgatcctttacacagagcagacttgaaacactctttttgtggaaattgcaagtggagatttcagccgctttgaggtcaatggtagaataggaaatatcttcctatagaaactagacagaatgattctcagaaactcctttgtgatgtatgtgttcaactcacagagtttaacctttcttttcattgagcagttaggaaacactctgtttgttaagtctgcaagtggatattcagacctctttgaggccttcgatggaaacgggtttttttcatataaggctagacagaagaattcccagtaacttccttgtgttgtgtgtgttcaactcacagagttgaactctcatttacacagagcagatttgaaacactctttttgtggaatttccaagtggagatttcaagtgctttgaggccaaaggcagaaaaggaaatatcttcgtataaaaactagacagaatcattctcagaaactgctctgcgatgtgtgcgttcaactctcagagtttaacttttcttttcattcagcagtttggaaacactctgtttgtaaagtctgcacgtggataacttgaccacttagaggccttcgttggaaacgggtttttttcatataaggctagacagaagaattcccagtaacttccttgtgttgtgtgcattcaactcacagagttgaacgttcccttagacagagcagatttgaaacactctatttgtgcaatttgcaagtgtagatttcaagcgctttaaggtcaatggcagaaaaggaaatatcttggtttcaaaactagacagaatcattcccacaaactgcgttgtgatgtgttcgttcaactcacagagtttaacctttcttttcatagagcagttaggaaacactctgtttgtaaactctgcaagtggatattcagacctctttgaggccttcgttggaaacgggatttcttcatactatgctagacagaataattctcagtaacttccttgttttgtgtgtattcaactcacagagttgaacgatcctttacagagagcagacttaaaacactctttttgtggaatttgcaagtggagatttcagccgctttgaggtcaatggtagaataggaaatatcttcctatagaaactagacagaatgattctcagaaactcctttgtgatgtgtgcgttcaactcacagagtttaccctttcttttcatagagcagttaggaaacactctgtttgtaaagtctgcaagtggatattcagacatccttgaggctttcgttggaaacgggatttcttcatattctgctagaaagaagaattcccagtgacttccttgtgttgtgtgtgttcaactcacagagttgaacgttcccttagacagagcagatttgaaacactctttttgtggaatttgcaagtggagatttcaagcgctttgaggccaaaggcagaaaaggaaatatcttcgtataaaaactagacagaatcattctcagaaactgctgcgtgatgtgtgcgttcaactctcagagtttaacttttcatttcattcagcggtttggaaaccctctgtttgtaaagtctgcacgtggatattttgaccacttagaggccttcgttggaaacgggttttttgcatgtaaggctagacagaagaattcccagtaacttccttgtgttgtgtgcattcaactcacagagttgaacgttcccttagacagagcagatttgaagcactctatttgtgcaatttgcaagtgtagatttcaagcgctttaaggtcaatggcagaaaaggaaatatcttcatttcaaaactagacagaatgattctcagaaactcctttgtgatgtgtgcgttctactcacagagttcaacctttcttttcatagagcagttgggaaacactctgtttgtaaagtctgcaagtggatattcagacttctttgaggccttcgttggaagcgggatttcttcatattctgctagacagaagaattctcagaaacttccttgtgttgtgtgttttcaactcacagagttgaacgatcctttacacagagcagacttgaaacactccttttgtggaatttgcaagtggagatttcagccgctttgaggccaatggtagaataggaaatatcttcctatagaaactagacagaatgattctcagaaacttctttgtgatgtgtgcgttcaactcacagagtttaacctttcttttcatagagcagttaggaaacactctgtttgtaaagtctgcaagtggatattcagacctctttgaggccttcgttggaaacgggatttcttcatactgtgctagacagaagaattctcagtaacttccttgtgttgtgtgtattcaactcacagagttgaacgatcctttacacagagcggacttgaaacacactttttgtggaatttgcaaggggagatttcagccgcattgaggtcaatggtagaaaaggaaatatcttcgtataaaaactagacagaatcattctcagaaactgctctgcgatgtgtgcgttcaactctcagagtttaacttttcttttcattcagcagtttggaaacactctgtttgtaaagtctgcacgtggataaattgaccacttagaggccttcgttggaaacgggtttttttcacgtaaggctagacagaagaattctcagtaacttccttgtgttgtgtgtattcaactcacacagttgaacgatcctttacacagagcagacttgtaacactctttttgtggaatttgcaattggagatttcagccgctttgaagtcaaatgtagaaaaggaaatatcttcctataaaaactagacagaatgattctcataaactcctttgtgatgtgtgcgttcaactcacagagtttaacctttctgttcatagagcagttaggaaacactctgtttgtaaagtctgcaagtggatattcagacctccttgaggccttctttggaaacgggatttcttcatattctgatagacagaagaattctcagtaacttccttgtgttgtgtgtattcaactcacagagttgaacgatcctttacacagagcagacttgaaacactctttttgtggaatttgcaagaggagatttcagcagctttgaggtcaatggtagaaaaggaaactatcttcgtataaagactagacagaatgattctcagaaaatcctttgtgatgtgtgcgttcaactcacagagtttaacttttcttttcatagagcagttaggaaacactctgtttgtaaagtctgcaagtggatattcagacctctttgaggccttcgttggaaacgggatttcttcatattatgctagaccgaagaattctcagtaactgccttgtgttgtgtgtattcaactcacagagttgaacgatcctttacacagagcagacttgaaacactcttttggtggaatttgcaagtggagatttcagccgctttgaggtcaatggtagaataggaaatatcttcctatagaaactagacagaatgattctcagaaactcctttgtgatgtgtgcattcaactcacagagtttaacctttcttttcatagagcagttaggaaacactctgtttgtaaagtctgcaagtggatattcagacctctttgaggccttcgttggaaacgggatttcttcatattatgctagacagaagaattctcagtaacttccttgtgttgtgtgtattcaactcacagagttgaacgatcctttacacagagtagacttgaaacactctttttgtggaatttgcaagtggagatttcaaccgctttgaggtcaatggtagaaaaggaaatatcttcgtataaaaactagacagaatcattctcagaaactgctgcgtgatgtgtgcgttcaactctcagagtttaacttttcttttcattcagcggtgtggaaacactctgtttgtaaagtctgcacgtggatattttgaccacttagaggccttcgttggaaacgggtttttttcatgtaaggctagagaaaagaattcccagtaacttccttgtgttgtgtgcattcaactcacagagttgaacgttcccttagacagagcagatttcaaacactctatttgtgcaatttgcaagtgtagatttcaagcgctttaaggtcagtggcagaaaaggaaatatcttcgtttcaaaactagacagaatgattctcataaactcctttgtgatgtgtgcgttcaactcacaaagtttaacttttcttttcatagagcagttaggaaacactctgtttgtaaagtctgcaagtggatattcagacctctttgagaccttcgttggaaacgggatttcttcatattatgctagacagaataattctcagtaacttccttgtgttgtgtgtattcaactcacagagttgaacgatgctttacacagagcagacttgaaacattctttttgtggaatttgcaactggagatttcagccgctttgaggtcaatggtagaataggaaatatcttcctatagaaactagacagaatgattctcagaaactcctttgtgatgtgtgtgttcaactcacagagtttaacatttcttttcatagagcagttaggaaacactctgtttgtaaagtctgcaagtggatattcagacctctttgaggccttcgttggaaacgggtttttttaatataaggctagacagaacaattctcagtaacttccttgtgttgtgtgtattcaactcacagagttgaacgatcctttacacagagcagacttgaaacactatttttgtggaatttgcaagtggagatttcatccgctttgaggtcaatggtagaataggaaatatcttcctatagaaagtagacagaatgattctcagaaacttctttgtgatgtgtgcgttcaactcacagagtttaacctttcttttcatagagcagttaagaaacactctgtttgtaaagtctgcaagtggatattcagacatctttgagactctcgttggaaacgggatttcttcatattctgctagacagaagaattctcagtaacttccttgtgttgtgtgtattcaactgacagagttgaactttcatttagagagagcagatttgaaacactgtttttgtggaatttgcaagtggagatttcaagcgctttggggccaaaggcagaaaaggaaatatcttcctataaaaactagacagaatcattctctgaaactgctctgtgatgtgtgcgttcaactctcagagtttaacttttcttttcattcagcaatttggaaacactctgtttgtaaagtctgcacgtggatattttgaccacttagaggccttcgttggaaacgggtttttttcatgtaaggctagacagaagaattcccagtaacttccttgtgttgtgtgcattcaactcacagagttgaacgttcccttagacagagcagatttgaaacactctatttgtgcaatttgcaagtgtagatttcaagcgctttaaggtaatggcagaaaaggaaatatcttcgtttcaaaactagacagaatcattcccacaaactgcgttgtgatgggttcgttcaactcacagagtttaacctttctgttcatagagcagttaggaaacactctgtaaagtctgtaagtggatattctgacatcttgtggccttcgttggaaacgggatttcttcatattctgctagacagaagaattctcagaaacttccttgtgttgtgtgttttcaactcacagagttgaacgatcctttacacagagtagacttgaaacactctttttgtggaatttgcaagtggagatttcagctgctttgaggtcaatggtagaaaaggaaatatcttcctatagaaactagacagaatgattctcagaaactcctttgtgatgtgtgcgttcaactcacagagtttaaacctttcttttcatagagcagttaggaaacactctggttgtaaagtctgcaagtggatattcagacctctttgaggccttcgttggaaacgggatttcttcatattctgctagacagaagaattcccagtaacttccttgtgttgtgtgtgttcaactcacagaattgaactttcatttacacagagcagatttgaaacactctttttgtggaatttgcaagtggagatttcaagcgctttgaggccaaaggcagaaaaggaaatatcttcgtataaaaactagacagaatcattctcagaaactgctctgcgatgtgtgcgttcaactctcagagtttaacttttcttttcattcagcagtttggaaacactctgtttgtaaagtctgcacgtggatattttgaccacttaaaggccttcgttggaaacgggtttttttcctgtaaggctagacagaagaattcccagtaacttccttgtgttgtgtacattcaactcacagagttgaacgttcccttagacagagcagatttgaaacactctttttgtgcaattggcaagtggtgatttcagccgctttgtggtcaatggtataaaaggaaatatcttcgtataaaaactagacagaatgattctcagaaacttcattgtgacgtgtgcgttcaactcacagagtttaacctttcttttcatagagcagttaggaaacactctgtttgtaaactctgcaagtggatattcagacctctttgaggccttcgttggaaacgggatttcttcatactgtgctagacagaagaattctcagtaacttccttgtgctgtgtgtattcaactcacagagttgaacgatcctttacacagagcagacttgaaacactctttttgtggaatttgcaagtggagatttcagccgctttgaggtcaatagtagaaaaggaaatatcttcgtagaaaaactagacagaatgattctcagaaactccttggtgatgtgtgcgttcaactcacagagtttaacttttcttttcatagagcagttaggaaacactctgtttgtaaagtctgcaagtggatattcagacctctttgaggccttcgttggaaacgggatttcttcatattatgctagacagaagaattcccagtaacttccatgtgttgtgtgtgttcaactcacagagttgaactgtcatttacacagagcagatttgaaacactgtttttgtggaatttgcaaatggagatttcaagcggtttgaggccaaaggcagaaaaggaaatatcttcgtataaaaactagacagaaatcattctcagaaactgctctgcgatgtgtgcgttcaactctcagagtttaacttttcttttcattcagaagtttggaaacactctgtttgtaaagtctgcacgtggataacttgaccacttagaggccttcgttggaaacgggtttttttcctgtaaggctagacagaagaattctcagtaacttccctgtgttgtgtgtattcaactcacagagttgaacgatccgttacacagagcatacttgaaacactcttcttgtggaatttgcaagtggagatttcagccgctttgaggtcaatggtagaataggaaatatcttcctatagaaactagacagaatgattctcagaaactcctttctgatgtgtgcgttcaactcaaagagtttaacctttcttttcgtagagcagctaggaaacactctgtttgtaaagtctgcaagtggatattcagacctctttgaggcctacgttggaaacgggatttcttcatattatgatagacagaagaattctcagtaacttccttgtgttgtgtgtattcaactgacggatttgaactttcatttagagagagcagatttgtaacactgtttttgtggaatttgcaagtggagatttcatgcgctttggggccaaaggcagaaaaggaaatatcttcgtataaaaactagacagaatcattcccagaaactgtgtagtgatgtgtatgtttaactcacagagtttaacatttcttttcatagagcagttgggaaacgctctgtttgaaaagtctgcctgtggatatttggaccgccatgaggcgttctttggaaatggtatttcttcatttaaggctacacagaagaattctcagaatcttcccttgtgttgtgtgtattcaactcacagagttgaacgatcctttacacagagcagatttgaaacactctttttgtggaatttgcaagtggagatttcagccgctttgaggtcaatggtagaaaatgaaatatcttcgtataaaaactagacagaatgattctcagaaactcctttgtgatgtgtgcgttgaactcacagagtttaagctttcttttcatagagtagttaggaaacactctgtttgtaaaatctgcaagtggatattcagacctctttgaggccttcgttggaaacgggatttcttcatattatgctagacagaagaattctcagaaacttcgttgtgttgtgtgttttcaaatcacagagttcaacgatcctttacagagagtagacttgaaacactctttttgtggaattggcagggtggagatttcagccgctttgaggtcaatggtagaaaaggaaatatcttcgtataaaaactagacagaatgattctcagaaactcctttgtgatgtgtgtgttcaactcacagagtttaacctttcttttcatagagcagttaggaaacactctgtttgtaaagactgcaagtggatattcaggcctctttgaggccttctttggaaacgggtttttttcatataaggctagacagaagaattcccagtaacttccttgtgttgtgtgtattcaactcacagagttgaactttcatttacacagagcagatttgaaacactctttttgtggaatttgcaaatggagatttcaagccctttcaggccaaaggcagaaaaggaaatatcttcgtataaaaactagacagaatcattctcagaaactgctctgcgatgtgtgcgttcaactctcagagtttaacttttcttttcattcagcagtttggaaacactctgtttgtaaagtctgcacgtggataacttgaccacttagaggccttcgttggaaacgggtttttttcctgtaaggctagacagaagaattcccagtaacttccttgtgttgtgtacaatcaactcacagagttgaacgttcccttagacagagcagatttgaaacactctttttgtgcaattggcaaatggagatttcaagcgctttaaggtcaatggcagaaaaggaaatatcttcgtttcaaaactagacagaatcattcccacaaactgcgttgtgatgtgttcgttcaacctacagagtttaacctttcttttcatagagcagttaggaaacagtctgtttgtaaattctgtaagtggatattctgacatcttgtggccttggttggaaacgggatttcttcatattctgctagacagaagaattctcagaaacttccttgtgttgtgtgttttcaactcacagagttgaacgatgctttacagagagtagacttgaaacactctttttgtggaatttgcaagtggagatttcagccgctttgaggtcaatggtagaataggaaatatcttcctatagaaactagacagaatgattctcagaaactcctttgtgatgtgtgcgttcaactcacagagtttaacctttcttttcatagagcagttgggaaacactctgtttgtaaagtctgcaagtagatattcagacatccttgaggctttcgttggaaacgggatttcttcatattctgctagaaagaagaattctcagtaacttccttgtgttgtgggtattcaactcacagagttgaacgatcctttacacagagcagacttgaaacactctttttgtggaatttgcaagtggagatttcagccgctttgaggtcaatggtagaataggaaatatcttcctatagaaactagacagaatcattctcagaaactgctctgcgatgtgtgcgttcaactctcagagtttaacttttcttttcattcagcagtttggaaacactctgtttgtgaagtctgcacgtggatattttgtccacttagaggccttcgttggaaacgggtttttttcctgtaaggctagacagaagaattcccagtaacttccttgtgttgtgtgcattcaactcacagagttgaacgttcccttagacagagcagatttgaaacactctatttgtgcaatttgcgagtgtagatttcaagcgctttaaggtcaacggcagaaaaggaaatatcttcgtttcaaaactagacagaatcattcccacaaactgcgttgtgatgtgttcgttcaactcacagagtttaacctttctgttcatagagcagttaggaaacactctgtttgtaaagtctgcaagtggatattcagacctcctagaggccttcgttggaaacgggatttcttcgtattctgctagacagaagaattctcagtaacttccttgtgttgtgtgtatgcaactcacagagttgaacaatcctttacacagagcagacttgaaacactccttttgtggaatttgcaagtggagatttcagccgctttgaggtcaatggtagaaaaggaaactatcttcttataaagactagacagaatgattctcagaaacttctttgtgatgtgtgcgttcaactcacagagtttaacctttcttttcatagagcagttaggaaacactttgtttgtaaagtctgcaagtggatatacagacctctttgaggccttcgttggaaacgggatttcttcatactatgctagacagaagaattcccagtaacttccttttgttgtgtgtgttcaactcacagagttgaactttcatttacacagagcagattggaaacactctttttgtggaatttgccagtggagatttcaagcgcattgaggccaaaggcagaaaaggaaatatcttcgtataaaaactagacagaatcattctcagaaactgctgcgtgatgtgtgggttcaactctcagagtttaacttttcttttcattcagcggtttggaaacactctgtttgtaaagtctgcacgtggatattttgaccacttagaggccttcgttggaaaagggtttttttcatgtaaggctagacagaagaattcccagtaacttccttgtgttgtgtacattcaactcacacagttgaacgttcccttagacagagcagatttgaaacactctttttgtgcaattggcaaatggagatttcaagcgctttaaggtcaatggcaggaaaggaaatatcttcgtttcaaaactagacagaatcattctcagaaactgctctgcgatgtgtgcgttcaactctcagagtttaaattttcttttcattcagcagtttggaaacactctgtttgtaaagtctgcacgtggataacttgaccacttagaggccttcgttggaaacgggtttttttcatgtaaggctagacagaagaattctcagtaacttccttgtgttgtgtgtattcaactcacagagttgaacgatcctttacacagagcagacttgtaacactctttttgtggaatttgcaagtggagatttcagccgctttgaagtcaaagatagaaaaggaaatatcttcctataaaaactagacagaatgattctcagaaactcctttgtgatgtgtgcgttcaactcacagagtttaaccttacttttcatagagcagttaggaaacactgtgtttgtaaagtctgcaagtggatattcagacctccttgaggccttcgttggaaacgggatttcttcatattatgctagacagaagaattcccagtaacttccttgtgttgtgtgtgttcaactcacagagttgaactttcatttacacagagcagatttgaaacactctttttgtggaatttgcaattggagatttcaagcgctttgaggccaaaggcagaaaaggaaatatcttcgtataaaaactagacagaatcattctcagaaactgctctgtgatgtgtccgttcaactctcagagtttaacttttcttttcattcagcagtttggaaacactctgtttgtaaagtctgcacgtggataatttgaccacttagaggccttcgttggaaacgggtttttttcatgtaaggctagacagaagaattcccggtaacttccttgtgttgtgtgcattcaactcacagagttgaacgttcccttagtcagagcagatttgaaacattctttttgtgcaatttgcaagtggagaattcaagcgctttaaggtcaatggcagaaaaggaaatatcttagtttcaaaactagacacaatcattcccacaaactgcgttgtgatgtgttcgttcaactcacagagtttaacctttctgttcttagagcagttaggaaacactctgtttgtaaagtctgtaagtggatattctgacatcttgtggccttcgttggaaacgggatttcttcatattctgctagacagaagaattctcagtaacttccttgtgttgtgtgtattcaactcacagagttgaacgatcctttacacagagcagacttgaaacactctttttgtggaatttgcaagtggagatttcagccgctttgaggtcaatggtagaaaaggaaacatcttcgtataaagactagacagaatgattatcagaaactcctttgtgatgtgtgcgttcaactcacagagtttaacctttcttttcatagagcagttaggaaacactctgtttgtaaagtctgcaagtggatattcagacctctttgaggccttcgttggaaacgggatttcttcatattctgctagacagaagaattctcagagtcttccttgtgttgtgtgtattcaactcacagagttgaacgatcctttacacagaggagacttgaaacactctttttgtggaatttgcaagtggagatttcagccgctttgaggtccatggtagaaaaggaaatatcttcgtataaaaactagacagaatgattcttagaaactcctttgtgatgtgtgcgttcaactcacagagtttaacctttcttttcatagagcagttaggaaacactctgtttgtaaagtctgcaagtggatattcagacctctttgaggccttcgttggaaacgggtttttttcatataaggctagacagaagaattcccagtaacttcccttgtgttgtgtgcattcaactcacagagttgaacattcccttagacagagcagatttgaaacactctatttgtgcaatttgcaagtgtagatttcaagcgctttaaggtcaacggcagaaaaggaaatatcttcgtttcaaaaccagacagaatcattcccacaaactgcgttgtgatgtgtacgttcaactcacagagtttaacctttctgttcatagagcagttaggaaacactctgtttgtaaagtctgtaagtggatattctgacatcttgtggccttcgttggaaacgggatttcttcatattctgctagacagaagaattctcagtaacttccttgtgttgtgtgtattcaactcacagagttgaacgatcctttacacagagcagacttgaaacactctttttgtggaatttgcaagtggagatttcagccgctttgaggtcaatagtagaaaaggaaatatcttcgtagataaactagacagaatgattctcagaaactcctttgtgatgtgtgcgttcaactcacagagtttaacctttcttttcatagagcagttaggaaacactctgtttgtaaagtctgcaagtggatattcagacctctttgaggccttcgttggaaacgggtttttttcatataaggctagacagaaggattcccagtaacttcccttgtgttgtgtgtgttcaactcacagagttgaactttcatttacaaagagcagatttgaaacactctttttgtggaatttgcaagtggagatttcaagcgctttgaggccaaaggcagaaaaggaaatatcttcgtataaaaactagacagaatcattctcagaaactgctgcgtgatgtgtgcgttcaactctcagagtttaacttttcttttcattcagcggtttggtaatactgtgtttgtaaagtctgcacgtggatattttgaccacttagaggccttcgttggaaacgggtttttttcatgtaaggctagacagaagaattcccagtaacttccttgtgttctgtgcattcaactcacagagttgaacgttcccttagacagagcagatttgaaacactctatttgtgcaatttgcaagtgtagatttcaagcgctttaaggtcaatggcagaaaaggaaatatcttcgtttcaaaactagacagaatcattcccacaaactgcgttgtgatgtgttcggttcaactcacagagtttaacctttcttttcatagagcagttaggaaacagtctgtttgtcaattctgtaagtggatattctgacatcttgtggccttcgttggaaacgggatttcttcatattctcctagacagaagaattctcagtaacttccttgtgttgtgtgtattcaactcacagagttgaacgatcctttacacagagcagacttgaaacactctttttgtgaaatttgcaagtggagatttcagccgatttgtggtcaatggtagaataggaaatatcttcctatagaaactagacagaatgattctcagaaacttctttgtgatgtgtgcgttcaactcacagagtttaacctttcttttcatagagcagttaggaaacactctgtttgtaaactctgcaagtggatattcagacctctttgaggccttcgttggaaaccggatttcttcatactgtgctagacagaagaattctcagtaacttccttgtgttgtgtgtattcaactcacagagttgaacgatcctttacacagagcagacttgtaacactctttttgtggaatttgcaagtggagatttcagccgctttgaggtcaatggtagaaaaggaaatatcttcctataaaaactagacagaatcattctcagaaactgctctgcgatgtgtgcgttcaactctcagagtttaactttgcttttcattcagcagtttggaaacactctgtttgtaaagtctgcacgtggataatttgaccacttagaggccttcgttggaaacgggtttttttcatgtaaggctagacagaagaattcccagtaacttccttgtgttgtgtgcattcaactcacagagttgaacgttcccttagacagagcagatttgaaaaactctatttgtgcaatttgcaagtgtagatttcaagcgctttaaggtcaacggcagaaaaggaaatatcttcgtttcaaaactagacagaatgattctcagaaactcctttgtgatgtgtgcgttcaactcacagagtttaacttttcttttcatagaccagttaggaaacactctgtttgtaaagtctgcaagtggatattcagacctctttgaggccttcgttggaaacgggatttcttcatattatgctagacagaataattctcagtaacttccttgtgttgtgtgtattcaactgacagagttgaacgatcctttacacagagcagacttgaaacactctttttgtggaatttgcaagtggagatttcagccgctttgaggtcaatagtagaaaaggaaatatcttcgtagaaaaactagacagaatgattctcagaaactcctttgtgatgtgtgcgttcaactcacagagtttaacctttcttttcatagagcagttaggaaacactctgtttgtaaagtctgcaagtggatattcagacttccttgaggccttcgttggaaacaggatttcttcatatttctgctagacagaagaattcccagtaacttcccttgtgttgtgtgtgttcaactcacagagttgaactttcatttacacagagcagatttcaaacactctttttgtggaatttgcaagtggagatttcaagcgctttgaggccaaaggcagaaaaggaaatatcttcgtataaaaactagacagaatcattctcagaaactgctctgtgatgtgtgcgttcaactctcagagtttaacttttcttttcattcagcagtttggaaacactctgtttgtaaagtctgcacgtggataatttgaccacttagaggccttcattggaaaagggtttttttcatgtaaggctagacagaagaattctcagtaacttccttgtgttgtgtgtattcaactcacagagttgaacgttcccttagacagagcagatttgaaacactctatttgtgcaatttgcaagtgtagttttcaagctctttaaggtcaacggcagaaaaggaaatatcttcgtttcaaaactagacagaatcattcccacaaactgcgttgtgatgtgttcgttcaactcacagagtttaacctttctgttcacagagcagttaggaaacactctgtttgtaaagtctgtaagtggatattctgacatcttgtggccttcgttggaaacgggatttcttcatattctgctagacagaagaattctcagaaacttcgttgtgttgtgtgttttcaactcacagagttcaacgatcctttacacagagtatacttgaaacactctttttgtggaattggcagggtggagatttcagccgctttgaggtcaatggtagaaaaggaaatatcttcgtataaaaactagacagagtgattctcagaaactcctttgtgatgtctgcgttcaactcacagagtttaaactttcttttcatagagcagttaggaaacactctgtttgtaaagtctgcaagtggatattcagacctccttgaggccttcgttggaaacgggatttcttcatattctgctatacagaagaattcccagtaacttccttgtgttgtgtgtgttcaactcacagagttgaactttcatttagacagagcagatttgaagcactctttttgtggaatttgcaagtagagatttcaagcgctttgaggccaaaggcagaaaaggtaatatcttcgtttcaaaactagccagaatcattctcagaaactgctctgcgatgtgtgcgttcaactctcagagtttgacttttcttttcattcagcagtttggaaacactctgtttgtaaagtctgcacgtggataatttgaccacttagaggccttcattggaaacgggtttttttcatgtaaggctagacagaagaattcccagtaacttaccttgtgttgtgtacattcaactcacagagttgaacgttcccttagacagagcagatttgaaacactctttttgtgcaattggcaagtggagatttcaagcgctttaaggtcaatggcagaaaaggaaatatcttcgtttcaaaactagacagaatcattcccacaaactgcgttgtgatgtgttcgttcaactcacagagtttaacctttcttttcctagagcagttaggaaacagtctgtttgtcaattctgtaagtggatattctgacatcttgtggccttcgttggaaacgggatttcttcatattctgctagacagaagaattctcagtaacttcatagtgttgtgtgtattcaactcacagatttcaacgatcctttacaaagagcagacttgaaacactctttttgtggaatttgcaagtggagatttcagccgctttgaggtcaatggtagaataggaaatatcttcctatagaaactagacagaatgattctcagaaacttctttgtgatgtgtgcgttcaactcacagagtttaacctttcttttcatagagcagttgggaaacactctgtttttaaagtctgcaagtggatattcagacctctttgaggccttcgttggaaacgggtttttttcatgtaaggctagacagaagaattctcagtaacttccttgtgttgtgtgtattcaactgacagagttgaactttcatttagagagagcagatttgaaacactgtttttgtggaatttgcaagtggagatttcaagcgctttggggccaagggcagaaaaggaaatatcttcgtataaaaactagacagaatcattctcagaaactgctgcgtgatgtgtgcgttcaactctcagagtttaacttttcttttcattcagcggtttcgaaacactctgtttgtaaagtctgcacgtggatattttgaccacttagaggccttcgttggaaacgggtttttttcatgtaaggctagacagaagaattctcagtaacttccttgtgttgtgtgtattcaactcacagagttgaacgatcctttacacagagcagacttgaaacattctttttgtggaatttgcaagtggagatttcaaccgctttgaggtcaatggtagaataggaaatatcttcctatagaaactagacagaacgattctcagaaactcctttctgatgtgtgcgttcaactcacagagtttaacctttcttttcatagagcagttaggaaacactctgtttgtaaagtctgcaagtggatattcagacctctttgaggccttcgttggaaacgggatttcttcatattctgctagacagaagaattctcagtaacttccttgtgttgtgtgtattcaactcacagagttgcacgaccctttacacagagcagacttgaaacactctttttgtggaatttgcaagtggagatttcagccgctttgaggtcaatagtagaaaaggaaatatcttcgtagaaaaactacacagaatgattctcagaaaatcttttgtgatgtgtgcgttcaacacacagagtttaacttttcttctcatagagcagttaggaaacactctgtttgtaaagtctgcaagtggatattcagacctctttgaggccttcgttggaaacgggatttcttcatattatgctagacagaagaattctcaggaacttccttgtgttgtgtgtattcaactgacagagttgaactttcatttagagagagcagatttgaaacactgtttttgtggaatttgcaagtggagattccaagcgctttggggccaaagccagaaaaggaaatatcttcgtagaaaaactagacagaatcattctcagaaactgctctgcgatgtgtgcgtccaactctcagagtttaacttttcttttcattcagcagtttgcaaacactctgtttgtaaagtctgcacgtggatattttgaccacttagaggccttcgttggaaacgggatttcttcatactatgctagacagaagaattctcagtaacttccttgtgttgtgtgtattcaactcacagagttgaacgatcctttacaaagagcagacttgtaacactctttttgtggaatttgcaagtggagatttcagccgctttgaagtcaaagatagaaaaggaaatatcttcctataaaaactagacagaatgattctcagaaactcctttgtgatgtgtgcgttcaactcacagagtttaaccttccttttcatagagcagttaggaaacactctgtttgtaaagtctgcaagtggatattcagacctccttgaggccttcgttggaaacgggatttcttcatattatgctagacagaagaattctcagtaacttccttgtgttgtgtgtattcaactcacagagttgaacgatcctttacacagagcggacttgaaacactcgttttgtggaatttgcaagtggagatttcagccgtgttgaggtaaatggtagaaaaggaaatatcttcgtataaaaactagacagaatgattctcagaaactcctttgtgatgtgttcgttcaactcacagagttcaacctttcttttcatagagcagttgggaaacactctgtttgtaaagtctgcaagtggatattcagacttctttgaggccttcgttggaagcgggatttcttcatattctgctagacagaagaattcccagtaacttccttgtgttgtgtgtgttcaactcacagagttgaactttcatttacacagagcagatttgaaacactctttttgtggaatttgcaaatggagatttcaagcgctttgaggccaaatgcagaaaaggaaatatcttcgtataaaaactagacagaatcattctcagaaactgctctgcgatgtgtgcgttcaaccctcagagtttaacttttcttttcattcagcagtttggaaacactctgtttgtaaagtctgcacgtggatattttgaccacttagaggccttcgttggaaacgggtttttttcctgtaaggctagacagaagaattcccagtaacttccttgtgttgtgtacattcaactcacagagttgaacgttcccttagacagagcagatttgaaacactctttttgtgcaattagcaagtggagatttcaagcgctttaaggtcaatggcagaaaaggaaatatcttactttcaaaactagacagaatcattccgacaaactgcgttgtgatgtgttcgttcaactcacagagtttaacctttctgttcatagagcagttaggaaacactctgtttgtaaagtctgtaagtggatattctgacatcttgtggccttcgttggaaacgggatttcttcatattctgctggacagaagaattctcactaacttccttgtgttgtgtgtattcaactcacagagttgaacgatcctttacacagagcagacttgaaacactctttttgtggaatttgcaagtggagatttcagtcgctttggggtcaatagtagaaaaggaaatatcttcgtagaaaaactagacagaatgattctcagaaactcctttgtgatgtgtgcgttcaactcacagagtttaacctttcttttcatagagcagttaggaaacactctgtttgtaaagtctgcaagtggatattcagacctccttgaggccttcgttggaaacgggatttcttcatatgatgctagacagaagaattcccagtaacttccttgtgttgtgtgtgttcaactcacagagtagaactttcatttacacagagcagatttgaaacactctttttgtggaatttgcaagtggagatttcaagcgctttgaggccaaaggcagaaaaggaaatatcttcgtataaaaactagacagaatcattctcagaaactgctctgcgatgtgtgcgttcaactctcagagtttaacttttcttttcattcagcagtttggaaacactctgtttgtaaagtctgcacgtggatattttgaccatttagaggccttcgttggaaacgggtttttttcttgtaaggctagacagaagatttcccagtaacttccttgtgttgtgtacattcaactcacagagttgaacgttcccttagacagagcagatttgaaacactctttttgtgcaattggcaagtggagatttcaagcgctttaaggtcaatggcagaaaaggaaatatcttcgtttcaaaactagacagaatcattcccacaaactgcgttgtgatgtgttcgttcaactcacagagtttaacctttctgttcatagagcagttaggaaacactgtgtttgtaaagtctgtaagtggatattcagacctccttgaggccttcgttggaaacgggatttcttcatattctgctagacagaagaattctcactaacttccttgtgttgtgtgtattcaactcacagagttgaacgatcctttacacagagcagacttgaaacactctttttgtagaattggcaagtggagatttcagccgctttgaggtcaatggtagaaaaggaaatatcttcgtataaagactagacagaatgattctcagaaactcctttgtgatgtgtgcgttcaactcacagagtttaacttttcttttcatagagcagttaggaaacactctgtttgtaaagtctgcaagtggatattcagacctctttgtggcctttgttggaaacgggatttcttcatattatgctagacagaagaattctcagtaacttccttgtgttgtgtgtattcaactgacagagttgaactttcatttagagagagcagatttgaaacactgtttttgtggaatttgcaaatggagatttcaagcgctttggggccaaaggcagaaaaggaaatatcttcgtataaaaactagaaagaatcattctcagaaactgctctgcgatgtgtgcgttcaactctcagagtttaacttttcttttcattcagcagtttggaaacactctgtttgtaaagtctgcacgtggatattttgaccacttagaggccttcgttggaaacgagattttttcctgtaaggctagacagaagaattcccagtaacttccttgtgttgtgtgcattcaactcacagagttgaaccttcccttagacagagcagatttgaaacactctatttgtgcaatttgcaagtgtagatttcaagcgctttaaggtcaatggcagaaaaggaaatatcttcgtttcaaaactagacagaatcattcccacaaactgcgttgtgatgtgctcgttcaactcacagagtttaacctttctgctcatagagcagttaggaaacactctgtttgtaaagtctgtaagtggatattctgacatcttgtggccttcgttggaaacgggatttcgtcatattctgctagacagaagaattctcagtaacttccttgtgttgtgtgtattcaactcacagagttgaacgatcgtttacacagagcagacttgtaacactctttttgtggaatttgcaagtggagatttcagccgctttgaagtcaaaggtagaaaaggaaatatcttcctataaaaactagacagaatgattctcatgaactcctttgtgatgtgtgcgttcaactcacagagtttaacctttcttttcatagagcagttaggaaacactctgtttgtaaagtctgcaggtggatattcagacctccttgaggccttcgttggaaacgggatttcttcatattctgctagacagaagaattcccagtaacttcccttgtgttgtgtgtgttcaactcacagagttgaactttgatttacacagagcagatttgaaacactctttttgtggaatttgcaagtggaaatttcaagcgctttgaggccaaaggcagaaaaggaaatatcttcgtataaaaactagacagaatcattctcagaaactgctctgcgatgtgtgcgttcaactctcagagtttaacttttcttttcattcagcagtttggaaacactctgtttgtaaagtctgcacgtggatattttgaccacttagaggccttcgttggaaacgggtttttttcctgtaaggctagacagtagaattcccagtaacttccttgtgttgtgtacattcaactcacagagttgaacgttcccttagacagagcagatttgaaacactctttttgtgcaattggcaaatggagatttcaagggctttaaggtcaatggcaggaaaggaaatatcttcgtttcaaaactagacagaatcattcccacaaactgcgttgtgacgtgttcgttcaactcacagagtttaacctttctgttcatagagcagttaggaaacactctgtttgtaaagtctgcaagtggatattcagacctccttgaggccttcgttggaaacgggatttcttcatattatgctagacagaggaattctcagtaacttccttgtgttctgtgtattcaactgacagagttgaacgatcctttacacagagcagacttgaaacactctttttgtggaatttgcaagtggagatttcagccgctttgaggtcaatggtagaaaaggaaactatcttcgtatacagactagacagaatgtttctcagaaactgctttgtgatgtgtgcgttcaactcacagagttcaacctttcttttcatagagcagttgggaaacactctgtttgtaaagtctgcaagtggatattcagacttctttgaggccttcgttggaagcgggatttcttcatattctgctagacagaagaattcccagtaacttaccttgtgttgtgtgtgttcaactcacagagatgaactctcatttacacagagcagatttgaaacactctttttgtggaatttgcaagtggagatttcaagcgctttgaggccaaaggcagaaaaggaaatatcttcgtataaaaactagacaaaatcattctcagaaactgctgcgtgatgtgtgcgttcaactctcagagtttaacttttcttttcattcagcggtttggaaacactctgtttgtaaagtcggcacgtggatattttgaccacttagaggccttcgttggaaacgggtttttttcatgtaaggctagacagaagaattcccagtaacttccttgtgttgtgtgcattcaactcacagagttgaacgttcccttagacagagcagatttgaaacactctatttgtgcaatttgcaagtgtagatttcaagcgatttaaggtcaatggcagaaaaggaaatatcttcgtttcaaaactagacagataatcattcccacaaactgcgttgtgatgtgttcgttcaactcacagagtttaacctttccgttcatagagcagttaggaaacacactgtttgtaaagtctgtaagtggatattctgacatcttgtggccttcgttggaaacgggatttcttcatattctgctagacagaaagaattctcagtaacttccttgtgttgtgtgtattcaactcacagcagttgaacgatcctttacagagagcagacttgaaacactctttttgtggaatttgcaagtggagatttcagccgctttgaggtcaatggtagaataggaaatatcttcctatagaaactagacagaatgattctcagaaactcctttgtgatgtgtgcgttcaactcacagagttcaacctttcttttcatagagcagttgggaaacactctatttgtaaagtctgcaagtggatattcagacttctttgaggccttcgttggaagcgggatttcttcatattctgcttgacagaagaattcccagtaacttcccttgtgttgtgtgtgttcaactcacagagttgaactttcatttacacagagcagatttgaaatactctttttgtggaatttgcaggtggagatttcaagcgctttgaggccaaaggcagaaaaggaaatatcttcgtataaaaactagacagaatcattctcagaaactgctctgtgatgtgtgcgttcaactctcagagtttaacttttcttttcattcagcagtttgtaaacactcagtttgtaaagtctgcacgtggatattttgaccactcagaggccttcgttggaaacgggtttttttcatgtaaggctagacagaagaattccgagtaacttccttgtcttgtgtgcattcaactcacagagttgaacgttcccttagacagagcagatttgaaacactctttttgtgcaatttgcaagtggagatttcaagcgatttagggtcaatggcagaaaaggaaatatcttcgtataaaaactagacagaatcattcccacaaactgcgttgtgatgtgttcgttcaactcacagagtttaacgtttctgttcatagagcagttaggaaacactctgtttgtaaagtctgcaagtggatattcagacctccttgaggccttcgttggaaacgggatttcttcatattctgctagacagaagaattctcagtaacttctttgtgttgtgtgtattcaactcacagagttgaacgatcctttacacagagcagtcttgaaacactctttttgtggaatttgcaagtggagatttctgccgctttgaggtcaatggtagaataggaaatatcttcctatagaaactagacagaatgattctcagaaactcctttgtgatgtgtgcgttcaactcacagagttcaacctttcttttcatagagcagttgggaaacactctgtttgtaaagtctgcaagtggatattcagacttctttgaggccttcgttggaagcggaatttcttcatgttctgctagacagaagaattctcagtaacttccttgtgttgtgtgtattcaactcacagagttgaacgatcctttacacagagcagacttggaacactctttttgtggaatttgcaagtggagatttcagccgcgttgaggtcaatggtagaaaaggaaatatcttcctataaaaactagacagaatgattctcagaaactcctttgtgatgtttgctttcaaatcacagagtttaacctttcttttcatagagcagttaggaaacactctggttgtaaagtctgcaagtggatattcagacctctttgaggccttcgttggaaacgggatttcttcatattctgctagacagaagaattcccagtaacttccttgtgttgtgtgtgttcaactcacagatttgaactttcatttacacagagcagatttgaaacactctttttgtggaatttgcaaatggagatttcaagcgctttgaggccaaaggcagaaaaggaaatatcttcgtataaaaactagacagaatcattctcagaaactgctctgcgatgtgtgccttcaactcacagagtttaacttttcttttcattcagcagtttggaaacactctgtttgtaaagtctgcacgtggatattttgaccacttagaggccttcgttgcaaacgggtttttttcctgtaaggctagacagaagaattcccagtaacttccttgcgttgtgtacattcaactcacggagttgaacgttcccttagacagagcagatttgaaacactctttttgtgcaattggcaagtggagatttcaagcgctttgaggtcaatggtagaaaaggaaatatcttcgtttcaaaactagacagaatcattcccacaaactgcgttgtgatgtgttcgttcaacacacagactttaacctttcttttcatagagcagttaggaaacagtctgtttgtaaattctgtaagtggatattctgacatcttgtggccttcgttggaaacgggatttcttcatattctgctagacagaagaattctcagtaacttccttgtgttgtgtgtattcaactcacagagttgaacgatcctttacacagagcagacttgaaacactctttctgtggaatttgcaagtggagatttcaaccgctttgaggtcaatagtagaaaaggaaatatcttcgtagaaaaactagacagaatgattctcagaaactcctttgtgatgtgtgtgttcaactcacagagtttaacctttcttttcatagagcagttagtaaacactctgtttataaagtctgcaagtggatattccaacccctttgaggccttcgttggaaacgggatttcttcatattatgctagacagaagaattcccagtaacttccttgtgttgtgtgtgttcaactcacagagttgaactttcatttacacagagcagatttgaaacactctttttgtggaatttgctaatggagatttcaagcgctttgaggccaaaggcagaaaaggaaatatcttcgtataaaaactagacagaatcattctcagaaactgctgcgtgatgtgtgtgttcaactctcagagtttaactttccttttcattcagcggtttggaaacactctgtttgtaaagtctgcacgtggatattttgaccacttagaggccttcgttggaaacgggtttttttgtatgtaaggctagacagaagaattcccagtaacttccttgtgttgtgcgcattcaactcacagagttgaacgttcccttagacagagcagatttgaaacactctatttgtgcaatttgcaagtgtagatttcaagcgctttaaggtcaagggcagaaaaggaaatatcttcgtttcaaaactagacagaatgattctcagaaactcctttgtgatgtgtgcgttcaactcacagagtttaacctttctgttcatagagcagttaggaaacactctgtttgtaaagtctgcaagtggatattcagacctccttgaggccttcgttggaaacgggatttcttcatattctgcttgacagaagaattctcagtaacttccttgtgttgtgtttattcaactcacagagttgaatgatcctttacacagagcagacttgaaacactctttttgtggaatttgcaagtggagatttcagccgctttgaggttaatggtagaaaagtaaatatcttcgtataaagactagacagaatgattctcagaaacttctttgtgatgcgtgcgttcaactcacagagtttaacctttcttttcatagagcagttaggaaacactctgtttgtaaactctgcaagtggatattcagacctctttgaggccttcgttggaaacgggatttcttcatactatgctagacagaagaattctcagtaacttctttgtgttgtgtgtattcaactgacagagttgaactttcatttagagagagcagatttggaacactgtttttgtggaatttgcaagtggagatttcaagcgctttggggccaaaggcagaaaaggaaatatcttcgtataaaaactagacagaatcattctcagaaaccgctctgtgatgtgtgcgttcaactcgcagagtttaacttttcttttcattcagcagtttggaaacactctgtttgtaaagtctgcacgtggatattttgaccacttagaggccttcgttggaaacgggttttttttcatgtaaggctagacggtagcattcccagtaacttccttgtgttgtgtgcattcaactcacagagatgaatgttcccttagacagagcagatttgaaacactctatttgtgcaatttgcaagtgtagatttcaagcgctttaaggtcaatggcagaaaaggaaatatcttcgtttcaaaactagacagaatcattcccacaaactgcgttgtgatgtgttcgttcaactcacagagtttaacctttctgttcatagagcagttaggaaacactctgtttgtaaagtctgcaagtggatattcagacctccttgaggccttcgttggaaaccggatttcttcatattctgctagacagaagaattctcagtaacttccttgtgttgtgtgtattcaactcacagagttgaacgatgctttacacagagcagacttgaaacactctttttgtggaatttgcaagtggagatttcagccgctttgaggtcaatggtagaaaaggaaatatcttcgtataaagactagacagaatgattctcagaaactcctttgtgatgtgtgtgttcaactcacagagtttaacctttcttttcatagagcatttagtaaacactctgtttataaagtctgcaagtggatattcagacccctttgaggccttcgttggaaacgggatttcttcatattatgctagacagaagaattcccagtaacttccttgtgttgtgtgtgttcaactcacagagttgaactttcatttacacagagcagatttgaaacactcttttcgtggaatttgcaaatggagatttcaagcgctttgaggccaaaggcagaaaaggaaatatcttcgtataaaaactagacagaatcattctcagaaactgctctgcgatgtgtgcgttcaactctcagagtttaactttgcttttcattcagcagtttggaaacactctgtttgtaaagtctgcacgtggataatttgaccacttagaggccttcgttggaaacgggtttttttcatgtaaggctagacagaagaattcccagtaacttccttgtgttgtgtgcattcaactcacagagttgaacgttcccttagacagagcagatttgaaacactctgtgcaatttgcaagtgtagatttcaagcgctttacggtcaatggcagaaaaggaaatatcttcgtttcaaaactagacagaatcattcccacaaactgcgttgtgatgtgttcgttcaactcacagagtttaacctttcttttcatagagcagttaggaaacaatctgtttgtaaattctgtaagtggatattctgacatcttgtggccttcgttggaaacgggatttcttcatattctgctagacagaagaattctcagtaacttccttgtgttgtgtgtattcaactcacagagttgaacgatcctttacacagagcagacttgtaacactctttttgtggaatttgcaagtggagatttcacccgctttgaagtcaaaggtagaaaaggaaatatcttcctataaaaactagacagaatgattctcagaaactcctttgtgatgtgtgcgttcaactcacagtgtttaacctttcttttcatagagcagttaggaaacactctgtttgtaaagtctgcaagtggatattcagacctccttgaggccttcgttggaaacgggattttttcatataaggctagacagaagaattcccagtaacttccttgtgttgtgtgtgttcaactcacagagttgaactttcatttacgcagagcagatttgaaacactctttttgtggaatttgcaagtggagatttcaagcgctttgaggccaaaggcagaaaaggaaatatcttcgtttcaaaactagacagaatgattctcagaaactcctttgtgatgtgtgcgttcaactcacagagtttaacttttcttttcattcagcggtttggaaacactctgtttgtaaagtctgcacgtggatattcagacctctttgaggccttcgttggaaacgggtttttttcatgtaaggctagacagaagaattcccagtaacttccttgtgttgtgtacattcaactcacagagttgaacgttcccttagacagagcagatttgaaacactctttttgtgcaattggcaagtggtgatttcagccgctttgaggtcaatggtagaaaaggaaatatcttcgtataaaaactagacagaatcattcccacaaactgcgttgtgatgtgttcgttcaactcacagcagtttaacctttctgttcatagagcagttaggaaacactctgtttgtaaagtctgtaagtggatattctgacatcttgtggccttcgttggaaacgggatttcttcatattctgctagacagaatacttctcagtaacttccttgtgttgtgtgtattcaactcacagagttgaacgatcctttacagagagcagacttgaaacactctttttgtggaatttgcaagtggagatttcagccgctttgagctcaatggtagaataggaaatatcttcctatagaaactagacagaatgattctcagaaactcctttgtgatgtgtgcgttcaactcacagagtttaacctttcttttcatagagcagttaggaaacactctgtttgtaaagtctgcaagtggatattcagacatctttgaggcgttcgttggaaacgggatttcttcatgttctgctagacagaagaattcccagtaacttccttgtgttgtgtgtgttcaactcacagagttgaactttcatttacccagagcagatttgaaacactctttttgtggaatttgcaagtggagatttcaagcgatttgaggccaaaggcagaaaaggaaatatcttcgtttcaaaactagacagaatcattctccgaagctgctgcgtgatgtgtgcgttcaactctcagagtttaacttttcttttcattcagcggtttggaaacactctgtttgtgaagtctgcacgtggatattttgaccacttagaggccttcgttggaaacgggttttttgcatgtaaggctagacagaagaattcccagtaacttccttgtgttgtgtacattcaactcacagagttgaacgttcccttagacagagcagatttgaaacactctttgtgcaattggcaagtggagatttcaagcgctttaaggtcaatggcagaaaaggaaatatcttcgtttcaaaactagacagaatgattctcagaaactcttttgtgatgtgtgcgttcaactcacagagtttaacctttcttttcatagagcagttaggaaacactctgtttgtaaagtctgcaagtggatattcagacatccttgaggctttcgttggaaacgggatttcttcatattatgctagacagaagaattctcagtaacttccttgtgttgtgtgtattcaactcacagagttgaacgatcctttacacagagcagacttgaaacactccttttgtggaatttgcaagtggagatttcagccgctttgaggtcaatggtagaataggaaatatcttcctatagaaactagacagaatgattctcataaactcctttgtgatgtgtgagttcaaatcacagagtttaacttttcttttcatagagcagttaggaaacactctgtttctaaagtctgcaagtggatattcagatctctttgaggccttcgttggaaacgggatttcttcatattatgctagacagaagaattctcaggaacttccttgtgttgtgtgtattcaactcacagagttgaactttcatttacacagagcagatttgaaacactctttttgtggaatttgcaaatggagatttcaagcgctttgaggccaaaggcagaaaaggaaatatcttcgtataaaaactagacagaatcattctcagaaactgctgcgtgatgtgtgcgttcaactctcagagtttaacttttcttttcattcagcggtttggaaacactctgtttgtaaagtctgcacgtggatattttgaccagttagaggccttcgttggaaacgggtttttttcatgtaaggctagacagaagaattctcagtaacttccttgtgttgtgtgtattcaactcacagagttgaacgatcctttacacagagcagacttgaaacaatctttttgtggaatttgcaagtggagatttcagccgatttgaggtcaatggtagaaaaggaaatatcttcgtataaaaactagacagaatgattctcagaaactcctttgtgatgtgtgcgttcaactcacagagtttaacctttcttttcatagagcagttaggaaacactctgtttgtaaagtctgcaagtggatattcagacctccttgaggccttcgttggaaacgggatttcttcattttatgctagacagaagaattctcagtaacttccttgtgttgtgtgtattcaactcacagagttgaacgatcctttacacagagcatacttgaaacactcttgttgtggaatttgcaagtggagatttcagccgctttgaggtcaatggtagaataggaaatatcttcctatagaaactagacagaatgattctcagaaactcctttgtgatgtgtgcgttcaagtcacagagtttaacctttcttttcatagagtagttaggaaacactctgtttgtaaagtctgcaagtggatattcagacctctttgaggccttcgttggaaacgggtttttttcatataaggctagacagaagaattcccagtaacttccttgtgttgtgtgtgttcaactcacagagttgaactttcatttacccagagcagatttgaaacactctttttgtggaatttgcaaatggagatttcaagcgctttgaggccaaaggcagaaaaggaaatatcttcgtttcaaaactagacagaatgattctcagaaactcctttgtgatgtgtgcgttcaactcacagagtttaacctttgttttcattcagcggtttggaaacactctgtttgtaaagtctgcacgtggatattcagacctctttgaggccttcgttggaaacgggtttttttcatgtaaggctagacagaagaattcccagtaacttccttgtgttgtgtgcattcaactcacagagttgaacgttcccttagacagagcagatttgaaacactctatttgtgcaatttccaagtgtagatttcaagcgctttaaggtcaacggcagaaaaggaaatatcttcgtttcaaaactagacagaatcattcccacaaactgcgttgtgatgtgctcgttcaactcacagagtttaacctttcttttcatagagcagttaggaaacagtctgtttgtaaattctgtaagtggatattctgacatcttgtggccttcgttggaaacgggatttcttcatattctgctagacagaagaattctcagaatcttccttgtgttgtgtgtattcaactcacagagttgaacgatcctttacacagagcagacttgaaacactctttttgtggaatttgcaattggagatttcagccgctttgaggtccatggtagaaaaggaaatatcttcgtataaaaactagacagaatgattctcagaaactcctttgtgatgtgtgcgttcaactcacagagtttaacctctcttttcatagagcagttgggaaacactctgtttgtaaagtctgcaagtggatattcagacatccttgaggctttcgttggaaacgggatttcttcatattctgctagaaagaagaattctcagtaacttccttgtgttgtgtgtattcaactgacagagttgaactttcatttagagagagcagatttataacactgtttttgtggaatttgcaagtggagatttcagccgctttggggccaaaggccgaaaaggaaatatcttcgtataaaaactagacagaatcattctcagaaaatgctctgtgatgtgtgcgttcaactctcagagtttaacttttcttttcattcagcactttggaaacactctgtttgtaaagtctgcacgtggatattttgaccacttagaggtctttgttggaaacgggtttttttcacgtaaggctagacagaagaattcccagtaacttccttgtgttgtgtgcattcaactcacagagttgaacgttcccttagacagagcagatttgaaacactctatttgtgcaatttgcaagtatagatttcaagcgctttaaggtcaacggcagaaaaggaaatatcttcgtttcaaaactagacagaatcattcccacaaactgcgttgtgatgtgttcgttcaactcacagaggttaacctttctgttcatagagcagttaggaaacactctgtttgtaaagtctgcaagtggatattcagacctccttgaggccttcgttggaaacgggatttcttcatattctgctagacagaagaattctcagtaacttccttgtgttgtgtgtattcaactcacagtgttgaacgatcctttacacagagcagactagaaacactctttttgtggaatttgcaagtggagatttcagccgctttgaggtcaatggtagaaaaggaaatatcttccctcctataaaaactagacagaatgattctcagaaactcctttgtgatgtgtgcgttctactcacagagtttaacctttcttttcatagagcagttaggaaacactctgtttgtaaagtctgcaagagaatattcagacatctttgagactttcgttggaaacgggatttcatcatattctgctagacagaagaattcccagtaacttccttgtgttgtgtgtgttcaactcacagagttgaactttcatttacccagagcagatttgaaacactcttttagtggaatttgcaagtggagatttcaagcgctttgaggccaaaggcagaaaaggaaatatcttcgtttcaaaactagacagaatcattctcagaaactgctgcatgatgtgtgcgttcaactctcagagtttaacttttcttttcattcagcggtttggaaacactctgtttgtaaagactgcacgtggatattttgaccacttagaggccttcgttggaaacgggttttttttcatgtaaggctagacagaagaattcccagtaacttccttgtgttgtgtacattcaactcacagagttgaacgttcccttagacagagcagatttgaaatactctttttgtgcaattggcaagtggagatttcaagagctttaaggtcaatggcagaaaaggaaatatcttcgtttcaaaactagacagaatcattcccacaaactgcgttgtgatgtgttcgttcaactcacagagtttaaactttctgttcatagagcagttaggaaacactctgtttgtaaagtctgtaagtggatattctgacatcttgtggccttcgttggaaacgggatttcttcatattctgcttgacagaagaattctcagtaacttccttgtgttgtgtgtattcaactcacagagttgaacgatcttttacacagagcagacttgaaacactctttttgtggaatttgcaagtggagatttcagccgctttcaggtcaatagtagaaaaggaaatatcttcgtagaaaaactagacagaacgattgtcagaaactcctttatgatgtgtgcgttcaactcacagagtttaacctttcttttcatagagcagttaggaaacactctgtttgtaaattctgcaagtggataatcagacctctttgaggccatcgttggaaacgggatttcctcatattctgctagacagaagaattcccaataacttccttgtgttgtgtgtgttcaactcacagagttgaactttcatttacacagagcagatttgaaacactctttttgtggaatttgcaagtggagatttcaagcgctttgaggccaaaggcagaaaaggaaatatcttcgtttcaaaactagacagaatcattctcagaaactgctctgcgatgtgtgcgttcaactctcagagtttaacttttcttttcattcagcagtttggaaacactctgtttgtaaagtctgcacgtggataatttgaccacttagaggtcttcgttggaaacgggtttttttcatgtaaggctagactgaagaattcccagtaacttccttgtgttgtgtacattcaactcacagagttgaacgttcccttagacagagcagatttgaaacactctttttgtgcaattggcaaatggagatttcaagcgctttaaggtcaatggcagaaaaggaaatatcttcgtttcaaaattagacagagaatcattcccacaaactgcgttgtgatgtgttcgttcaactcacagcagtttaacctttcttttcatagagcagttaggaaacagtctgtttgtaaattctgtaagtggatattctgacatcttgtggccttcgttggaaacgggatttcttcatattgtgctagacagaagaattctcagaatcttccttgtgttgtgtgtattcaactcacagagttgaacgatggtttacacagagcagatttgaaacactctttttgtggaatttgcaagtggacatttcagccgctttgaggtcaatggtagaaaaggaaatatcttcgtataaaaactagacagaatgattctcagaaactcctttgtgatgtgtgcgttctactcacagagtttaacctttcttttcatagagcagttaggaaacactctgtttgtaaagtctgcaagtggatattcagacatctttgagactttcgttggaaacgggatttcatcatattctgctagacagaagaattctcagtaacttccttgtgttgtgtgtattcaactgacagagttgaactttcatttagagagatcagatttgaaacactgtttttgtggaatttgcaagtggagatttcaagcgctttggggccaaaggcagaaaaggaaatatcttcgtataaaaagtagacagaatcattctcagaaactgctgcgtgatgtgtgcgttcaactctcagagtttaacttttcttttcattcagcggtttggaaacactctgtttgtaaagtctgcacgtggaaattttgaccacttagaggccttcgttggaaacgggtttttttcatgtaaggctagatagaagaattcccagtaacttccttgtgttgtgtacattcaactcacagatttgaacgttcccttagacagagcagatttgaaacactctttttgtgcaattggcaaatggagatttcaagcgctttaaggtcaatggcagaaaaggaaatatcttcgtttcaaaactagacagaatcattcccacaaactgcgttctgatgtgttcgttcaactcacagtagtttaacctttctgttcatagagcagttaggaaacactctgtttgtaaagtctgtaagtggatattctgacatcttgtggccttcgttggaaacgggatttcttcatattctgctagacagaagaattctcagtaacttccttgtgttgcgtgtattcaactcacagaggttgaacgatcctttacacagagcagacttgaaacactctttttgtggaatttgcaagtggagatttcagccgctttgaggtcaatatgtagaaaaggaaatatcttcgtagaaaaactagacagaaatgattctcagaaactcctttgtgatgtgtgtgttcaactcacagagtttaacctttcttttcatacagcagttaggaaacactctgtttgtaaattctgcaagtggatattttgaccgctttgaggccttcgttggaaacgggtttttttcatgtaaggctagacagaagaattctcagcaacttccttgtgttgtgtgtattcaactgacagagttgaactttcatttagagagagcagatttgaaacactgtttttgtggaatttgcaagtggagatttcaagcgctttggggccaaaggcagaaaaggaaatatcttcgtataaaaactagacagaatcattctcagaaactgctctgtcatgtgtgcgttcaactctcagagtttaacttttcttttcattcagcagtttggaaacactctgtttgtaaagtctgcacgtggatatttttaccacttagaggtcttcgttggaaacgggtttttttcatgtaaggctagacagaagaattcccagtaacttccttgtgttgtgtgcattcaactcacagagttgaacgttcccttagacagagcagatttgaaacactctatttgtgcaatttgcaagtgtagatttcaagcgctttaaggtcaacggcagaaaaaggaaatatcttcgtttcaaaactagacagaatgattctcagaaacttctttgtgatgtgtgcgttcaactcacagagtttaacctttcttttcatagagcagttaggaaacactctgtttgtaaagtctgcaagtggatatacagacctctttgaggccttcgttggaaacgggatttcttcatactatgctagacagaagaattctcagtaacttccttgtgttgtgtgtattcaactcacagagttgaactatcctttacacagagcagacttgaaacactcgttttgaggaatttgcaagtggagatttcagccgctttgaggtcaatggtagaaaaggaaatctcttcgtataaaaactagacagaatgattctcagaaactcctttgtgatgtgtgcgttcaactcacagagtttaacttttcttttcatagagcagttaggaaaaactctgtttgtaaagtctgcaagtggatattcagacctctttgaggccttcgttggaaacgggatttcttcatattctgctagacagaagaattcccagtaacttccttgtgttgtgtgtgttcaactcacagagttgaactttcatttacacagagcagatttgaaacactctttttgtggaatttgcaagtggagatgtcaagcgctttgaggccaaaggcagaaaaggaaatatcttcgtttcaaaactagacagaatcattctcagaaactgctgtgtgatgtgtgcgttcaactctcagagtttaacttttcttttcattcagcggtttggaaacactctgtttgtaaagtctgcacgtggaaattttgaccacttagaggccttcgttggaaacgggtttttttcatgtaaggctcgacagaagaattcccagtaacttccttgtgttgtgtgcattcaactcacagagttgaacgttcccttagacagagcagatttgaaacactctctttgtgcaatttgcaagtgtagatttcaagcgctttaaggtcaatggcagaaaagaaaatatcttcgtttcaaaacaagacagaatgattctcagaaactcctttgttatgtgtgcattcaactcacagagtttaccctttcttttcatagagcagttaggaaacactctgtttgtaaagtctgccagtggatattcagacatccttgaggctttcgttggaaacgggatttcttcatattctgccagaaagaagaattctcagtaacttccttgtgttgtgtttattcaactcacagagttgaatgatcctttacagagagcagacttgaaacactctttttgtggaatttgcaagtggagatttcagccgctttgaggtcaatggtagaaaggtaaatatcttcgtataaagactagacagaaatgattctcagaaacttctttgtgatgtgtgcgttcaactcacagagtttaacctttcttttcatagagcagttaggaaacactctgtttgtaaactctgcaagtggatattcagacctgtttgaggccttcgttggaaacgggatttcttcatactatgctagacagaagaattctcagtaacttccttgtgttgtgtgtattcaactgacggagttgaactatcatttagagagagcagatttgaaacactgtttttgtggaatttgcaagtggagatttcaagcgctttggggccaaaggcagaaaaggaaatatcttcgtataacaactagacagaatcattctcagaaactgctgcgtgatgtgtgcgttcaactctcagagtttaacttttctttttattcagcggtttggaaacactctgtttgtaaagtctgcacgtggatattttgaccacttagaggccttcgttggaaacgggtttttttcatgtaaggctagacagaagaattcccagtaacttccttgtgttgtgtgcattcaactcacagagttgaacgttcccttagacagagcagatttgaaacactctgtttgtgcaatttgcaagtgtagatttcaagcgctttaaggtcaatggcagaaaaggaaatatcttcgtttcaaaactagacagaatcattcccacaaactgcgttgtgatgtgttcgttcaactcacagagtttaacctttctgttcatagagcagttaggaaacactctgtttgtaaagtgtgtaagtggatattctgacatcttgtggccttcgttggaaacgggatttcttcatattctgctagacagaagaattctcagtaacttccttgtgttgtgtgtattcaactcacagagttgaacgatcctttacagagagcagacttgaaacactctttttgtggaatttgcaattggagatttcagccgctttgaggtcaatagtagaaaaggtaatatcttcgtagaaaaactagacagaatgattctcagaaacttctttgtgatgtgtgcgttgaactcacagagtttaaccttttttttcatagagcagttaggaaacactctgtttgtaaactctgcaagtggataatcagacctctttgaggccttcgttggaaacgggatttcttcatactatgctagacagaagaattctcagtaacttccttgtgttgtgtgttttcaactcacagagttcaacgatgctttacacagagtagacttgaaacactctttttgtgtaatttgcaagtggagatttcagccgctttgaggtcaatggtagaaaaggaaatatcttcgtataaaaactagacagagtgattctcagaaactcctttgtgatgtctgcgtttaactcacagagtataacctttcttttcatagagcagttaggaaacactctgtttgtaaagtctgcaagtggatattcagacctccttgaggccttcgttggaaacgggatttcttcatattatgctagacagaagaattctcagtaacttccttgtgttgtgtgtattcaactcacagagttgaaggatcctttacacagagcagactagaaacattctttttgtggaatttggaagtggagatttcagccgctttgaggtcaatggtagaataggaaatatcttcctatagaaactagacagaatgattctcagaaactcctttgtgatgtgtgcgttcaactcacagagtttaacctttcttttcatagagcagttaggaaacactctgattgtaaagtctgcaagtggatattcagacctccttgaggccttcgttggaaacgggatttcttcatattatgctagacagaagaattcccagtaacttccttgtgttgtgtgtgttcaactcacagagttgaactttcctttacacagagcagatttgaaacactctttttgtggaatttgcaagtggagatttcaagcgctttgaggccaaaggcagaaaaggaaatatcttcgtttcaaaactagacagaatcattctcagaaactgctctgtgatgtgtgcgttcaactctcagagtttaacttttcttttcattcagcagtttggaaacactctgtttgtaaagtctgcacgtggatattttgaccacttagaggccttcgttggaaacggtttttttcatgtaaggctagacagaagaattctcagtaacttccttgtgttgtgtgtattcaactcacagagttgaacgatcctttacacagagcagacttgtaacactctctttgtggaatttgcaagtggagatttcagccgctttgaagtcaaaggtagaaaaggaaatatcttcctataaaaactagacagaatcattcccacaaactgcgttgtgatgtgttcgttcaactcacagagtttaacctttctgttcatagagcagttaggaaacactctgtttgtaaagtctgtaagtggatattctgacattttttggccttcgttggaaatgggatttcttcatattctcctagacagaattctcagtaacttccttgtgttgtgtgtattcaactcacagagttgaacgatcctttgcacagagcagacttggaacactctttttgtggaatttgcaagtggagatttcagccgctttgaagtcaaaggtagaaaaggaaatatcttcctataaaaactagacagaatgattctcagaaacttctttgtgatgtgtgcgttcaactcacagagtttaacctttcttttcatagagcagttaggaaacactctgtttgtaaactctgcaagtggatattcagacctccttgaggccttcgttggaaacgggatttcttcatactgtgctagaccagaagaattctcagtaactttccttgtgttgtgtgtattcaactgacagagttgaactttcatttggagagagcagatttgaaacactgtttttgtggaatttgcaagtggagatttcaagcgctttggggccaaaggcagaaaaggaaatatcttcgtataaaaactagacagaaatcattctcagaaactgctctgcgatgtgtgcattcaactctcagtagtttaatttttcttttcattcagcagtttggaaacactctctttgtaaagtctgcacgtggatattttgaccacttagaggccttcgttggaaacgggttttattcttgtaaggctagacagaagaattcccaggaacttccttgtgttgtgtacattcaactcacagagttgaacgttcccttagacagagcagatttgaaacactctttttgtgcaattggcaagtggtgatttcagccgctttgtggtcaatggtagaaaaggaaatatcttcgtataaaaactagacagaatcattcccacaaactgcgttgtgatgtgttcgttcaactcacagagtttaacctttcttttcatagagcagttaggaaacagtctgtttgtcaattctgtaagtggatattctgacatcttgtggccttcgttggaaacgggatttcttcatatttggctagacagaagaattctcagtatcttccttgtgttgtgtgtattcaactcacagagttgaacgctcctttacacagagcagacttgaaacactctttttgtggaatttgcaagtggagatttaagccgctttgaggtcaatggtagaaaagggaatatcttcgtatagaaactagacagaatgattctcagaaactcctttgtgatgtgtgcgttcaactcacacagtttaacctttcttttcatagagcagttaggaaacactctgtttgtaaagtctgcaagtggatattcagacctccttgaggccttcgttggaaacgggatttattcatattatgctagacagaagaattcccagtaacttccttgtgttgtgtgtgttcaactcacagagttgaactttcatttacacagagcagatttgaaacactctttttgtggaatttgcaagtggagatttcaagcgctttgaggccagaggcagaaaaggaaatatcttcgtttcaaaactagacagaatgattctcagaaactgctgcgtgatgtgtgcgttcaactctcagagtttaacttttcttttcattcagcggtttggaaacactctgtttgtaaagtctgcacgtggatattttgaccacttagaggccttcgttggaaacgggtttttttcatgtaaggctagacagaagaattcccagtaacttccttgtgttgtgtacattctactcacagagttgaacgttcccttagacagagcagatttgaaacactctttttgtgcaattggcaagtggtgatttcaaccgctttgaggtcaatggtagaaaaggaaatatcttcgtataaaaactagacagaatgattctcagaaactcctttgtgatgtgtgcgttcaaatcacagagtttaacttttcttttcatagagcagttaggaaacactctgtttgtaaagtctgcaagtggatattcagacctctttgaggccttcgttggaaacggaatttcttcatattatgctagacagaagaattctcagtaacttccttgtgttgtgtgtattcaactcacagagttgaacgatcgtttacacagagcagacttgaaacattctttttgtggaatttgcaagtggagatttcagccgctttgaggtcaatggtagaataggaaatatcttcctatagaaactagacagaatgattctcagaaactcctttgtgatgtgtgtgttcaactcacagcagtttaacctttcttttcatagagcagttaggaaacgctctgtttgtaaagtctgcaagtggatattcagacctcgttgagaccttcgttggaaacgggatttcttcatattctgctagacagaagaattctcagaatctcccttgtgttgtgtgtattcaactcacagagttgaacgatcctttacacagagcagacttgaaacactctttttgtggaatttgcaagtggagatttcagccgctttgaggtccatggtagaaaaggaaatatcttcgtataaaaacaagacagaatggttctcagaaactcctttgtgatgtgtgcgttcaactcacagagtttaacttttcttttcatagagcagttaggaaacactctgtttgtaaagtctgcaagtggatattcagacctctttgaggccttcgttggaaacgggatttcttcatattctgctagacagaagaattcccagtaacttccttgtgttgtgtgtgttcaactcacagagttgaactttcatttacacagagcagatttgcaacactctttttgtggaatttgcaaatggagatttcaagcgctttgaggccaaaggcagaaaaggaaatatcttcgtttcaaaactagacagaatcattctcagaaacttctctgcgatgtgtgcgttcaactctcagagtttaacttttcttttcattcagcagtttggaaacactctctttgtaatgtctgcacgtggatattttgaccacttagaggccttcgttggaaacgggtttttttcctgtaaggctagatagaagaattcccagtaacttccttgtgttgtgtacattcaactcacagagttgaacgttcccttagacagagcagatttgaaacactctttttgtgcaattggcaagtggagatttcaagcgctttgaggtcaatggcagaaaaggaaatatcttcgtttcaaaactagacagaatgattctcagaaactcctttgtgatgtgtgcgttcaactcacagagtttaactttccttttcatagagcagttaggaaacactctgtttgtaaagtctgcaagtggatattcagacctctttgaggccttcgttggaaacgggatttcttcatattctgcttgacagaagaattctcagtaacttccttgtgttgtgtgtattcaagtcacagagttgaacgatcctttacacagagcagacttgaaacactctttttgtggaatttgcaagtggagatttcagccgctttgaggtcaatagtagaaaaggaaatatcttcgtagaaaaactagacagaatgattctcagaaattcctttgtgatgtgtgtgttcaactcacagagtttaacctttcttttcatagagcagttaggaaacactctgtttgtaaagtctgcaagtggatattcagacctctttgaggccttcgttggaaaagggatttcttcatgctctgctagacagaagaattctcagtaacttccttgtgttgtgtgtattcaactgacagagttgaactttcatttggagagagcagatttgaaacactgtttttgtggaatttgaaagtggagatttcaagcgctttggggccaaaggcagaaaaggaaatatcttcgtagaaaaactagacagaatcattctcagaaactgctctgtgatgtgtgcgttcaactctcagagtttaacttttcttttcattcagcagtttggaaacactctgtttgtaaagtctgcacgtggatattttgaccacttagaggccttcgttggaaacgggttttttttcatgtaaggctagacagaagaattcccagtaacttccttgtgttgtgtgcattcaactcacagagttgaacgttccttagacagagcagatttgaaacactctatttgtgcaatttgcaagtgtaggtttcaagcgctttaaggtcaatggcagaaaaggaaatatcttcgtttcaaaactagacagaatcattcccacaaactgcgttgtgatgtgttcgttcaactcacagagtttaacctttcttttcatagagcagttaggaaacagtctgtttgtaaattctgtaagtggatattctgacatcttgtggccttcgttggaaacgggatttcttcatattctgctagacggaagaattctcagtaacttccttgtgttgtgtgtattcaactcacagacttgaatgatcctttacacagaacagtcttgaaagactctttttgtggaatttgcaagtggagatttcagccgctttgaggtcaatggtagaataggaaatatcttcctatagaaactagacagaatgattctcagaaactcctttgtgatgtgtgcgttcaactcacagagtttaacttttcttttcatagagcagttaggaaacactctgtttgtaaagtctgcaagtggatattcagacctctttgtggccttcgtttgaaacgggatttcttcatattctgctagacagaagaattcccagtaacttccttgtgttgtgtgtgttcaactcacagagttgaactttcatttacacagagcagatttgaaacactctttttgtggaatttgcaagtggagatttcaagcgctttgaggccaaaggcagaaaaggaaatatcttcgtagaaaaactagacagaatcattctcagaaactgctctgcgatgtgtgcgttcaactctcagagtttaacttttgttttcattcagcagtttggaaacactctgtttgtgaagtctgcacgtggataacttgaccacttagaggccttcgttggaaacgggtttttttcatgtaaggctagacagaagaattcccagtaacttctttgtgttgtgtgcattcaactcacagagttgaacgttcccttagagagagcagatttgaaacactctatttgtgcaatttgcaagtgtagatttcaagcgctttaaggtcaatggcagaaaaggaaatatcttcgtttcaaaactagacagaatcattcccacaaactgcgttgtgatgtgttcgttcaactcacagagtttaacctttctgttcatagagcagttaggaaacactctgtttgtaaagtctgtaattggatattctgacatcttgaggccttcgttggaaacgggatttcttcatattctgctagacagaagaattctcagtaacttccttgtgttgtgtgtattcaactcacagagttgaacgatcctttacacagagcggacttgaaacactctttttgtagaatttgcaagtggagatttcagccgcgttgaggtcaatggtagaaaaggaaatatcttcgtataaaaactagacagaatgattctcagaaactcctttgtgatgtgtgtgttcaactcacagagtttaacctttcttttcatagagcagttaggaaacactgtgtttgtaaagtctgcaagtggatattcagacctctttgaggccttcgttggaaacgggtttttttcatataaggctagacagaagaattctcagtaacttccttgtgttgtgtgttttcaactgacagagttgaactttcatttagagagagcagatttgtaacactgtttttgtggaatttgcaagtggagatttcaagcgctttggggccaaaggcagaaaaggaaatatcttcgtataaaaactagacagaatcattctcagaaactgctctgcgatgtgtgcgttcaactctcagagtttaacttttcttttcattcagcagtttggaaacactctgtttgtaaagactgcacgtggataatttcaccacttagaggtcttcgttggaaacgggtttttttcatgtaaggatagacagaagaattcccagtaacttccttgtgttgtgtacattcaactcacagagttgaacgttcccttagacagagcagatttgaaacactctttttgtgcaattggcaagtggagatttcaagcgctttatggtcaatggcagaaaaggaaatatcttcgtttcaaaactagacagaatcattcccacaaactgcgttgtgatgtgttctttcatctcacagagtttaacctttcttttcatagagcagttaggaaacactatgtttgtaaattctgtaagtggatattctgacatcttgtggccttcgttggaaacgggatttcttcatattctgctagacagaagaattctcagtaacttccttgtgttgtgtgtattcaactcacagagttgaacgatcctttacacagagcagacttgaaacactctttttgtggaatttgcaagtggagatttcatccactttgaggtcaatagtagaaaaggaaatatcttcgtagaaaaactagacagaatgattctcagaaactcctttgtgatgtgtgcgttcaactcacagagtttaacctttcttttcatagagcagttaggaaacactctgtttgtaaagtctgcaagtggatattcagacctctttgaagccttcgttggaaacgggatttcttcatattatgctagacagaataattctcagtaacttccttgtgttgtgtgtattcaactcacagagttgaactatcctttacagagagcagacttgaaacactctttttgtggaatttggaagtggagatttcagccgctttgaggtcaaaggtagaataggaaatatcttcctacagaaaatagacagaatcattctcagaaactgctctgcgatgtgtgcgttcaactctcagagtttaacttttcttttcattcagcagtgtggaaacactgtgtttgtaaagtctgcacggggatattttgaccacttacaggccttcgttggaaacgggtttttttcctgtaaggctagacagaagaattcccagtaacttccttgtgttgtgcgcattcaactcacagagttgaacgttcccttagacagagcagatttgaaagagcctatttgtgcaatttgcaagtgtacatttcaagcgctttaaggtcaacggcagaaaaggaaatatcttcctttcaaaactagacagaatgattctcagaaactcctttgtgatgtgtgcgttcaactcacagagtttaacctttcttttcatagagcagttaggaaacactctgtttgtaaagtctgcaagtagatattcagacatccttgaggctttcgttggaaacgggatttcttcatattctgctagaaagaagaattctcagtaacttctttgtgttgtgtgtattcaactcacagagttgaacgatcctttacacagagcagacttgaaacactccttttgtggaatttgcaagtggagatttcagccgctttgaggtcaatggtagaataggaaatatcttcctatagaaactagacagaatgattctcagaaactcctttgtgatgtgtgtgttcacctcacagagtttaacctttcttttcatagagcagttagtaaacactctgtttataaagtctgcaagtggatattccgacccctttgaggccttcgttggaaacgggatttcttcatattatgctagacagaagaattctcagtaacttccttgtgttgtgtgtattcaactgacagagttgaactttcatttagagagagcagattagaaacactgtttttgtggaatttgcaagtgcagatttcaagcgctttgtggccaaaggcagaaaaggaaatatcttcgtatgaaaactagccagaatcattctcagcaaactgctctgcgatgtgtgcgttcaactctcagagtttaacttttcttttcattcagcagtttggaaacactctgtttgtaaagtctgcacgtggatattttgaccacttagaggccttcgttggaaacgggtttttttcctgtaaggctagacagaagaattcccagtaacttccttgtgttgtgtacattcaactcacagagttgaacgttcccttagacagagcagatgtgaaacactctttttgtgcaattggcaagtggagatttcaagcgctttaaggtcaatggcagaaaaggaaatatctttgtttcaaaactagacagaatcattcccacaaactgcgttgtgatgtgttcgttcaactcacacagtttaacctttcttttcatagagcagttaggaaacagtctgtttgtaaattctgtaagtggatattctgacatcttgtggccttcgttggaaacgggatttcttcatattctgctagacagaagaattctcagtaacttccttgtgttgtgtgtattcaactcacagagttgaacgatcgtttacacagagcagacttgaaacactctttttgtggaatttgcaagtggagatttcagccgctttgaggtcaatggtagaaaaggaaactatcttcatataaagactagacagaatgattctcagaaactcctttgtgatgtgtgcgttcaactcacagagtttaacctttcttttcatagagcagttaggaaacactctgtttgtaaagtctgcaagtggatattcagacctctttgaggccttcgttggaaacgggtttttttcatatcaggctagacagaagaattcccagtaacttccttgtgttgtgtgtgttcaactcacagagttgaactttcatttacacagagcagatttgaaacactctttttgtggaatgtgcaagtggagatttcaagcgctttgaggccaaaggcagaaaaggaaatatcttcgtataaaaactagacagaatcattctcagaaactgctgcgtgatgtgtgcgttcaactctcagagtttaacttttcttttcattcagcggtttggaaacactctgtttgtaaagtctgcacgtagaaattttgaccacttagaggccttcgttggaaacgggtttttttcatgtaaggctagacagaagaattcccagtaacttccttgtgttgtgtgcattcaactcacagagttgaacgttcccttagacagagcagatttgaaacactctatttgtgcaatttgcaattgtagatttcaagcgctttaaggtcaacggcagaaaaggaaatatcttcgtttcaaaactagacagaatgattgtcataaactcctttgtgatgtgtgcgttcaacacacagagtttaacctttctgttcatagagcagttaggaaacattctgtttgtaaagtctgtaagtggatattctgacatcttgtggccttcgttggaaacgggatttcttcatattctgctagacagaagaattctcagtaacttccgcgtgttgtgtgtattcaactcacagagttgaacgatcctttacacagagcagacttgtaacactctttttgtggaatttgcaagtggagatttcagccgctttgaagtcaaaggtagaaaaggaaatatcttcctataaaaactagacagaatgattctcagaaactcctttgttatgtgtgcgttcaactcacagagtttaacctttcttttcatagagcagttaggaaacactctgtatgtaaagtctgcaagtggatattgagacctctttgaggccttcgttggaaacgggaattcttcatattatgctagacagaagaattcccagtaacttccttgtgttgtgtgtgttcaactcacagagttgaacattcatttacccagagcagatttgaaacactctttttgtggaatttgcaagtggagatttcaagcgctttgaggccaaaggcagaaaaggaaatatcttcgtttcaaaactagacagaatcattatcagaaactgctgcgtgatgtgtgcgttcaactctcagaatttaagttttcttttcattcagcggtttggaaacactctgtttgtaaagtctgcacgtggatatattgaccacttagaggccttcgttggaaacgggtttttttcatgtaaggctagacagaagaattcccagtaacttccttgtgttgtgtgcattcaactcacagagttgaacgttcccttagacagagcagatttgaaacactctatttgtgcaatttgcaagtgtagatttcaagcgctttaaggtcaacggcagaaaaggaaatatcttcgtttcaaaactaggcagaatcattcccacaaactgcgttgtgatgtggtcgttcaactcacagagtttaacttttcttttcatagagcagttaggaaacacctctgtttgtaaagtctgtaagtggatattctgacatcttgtggccttcgttggaaacgggatttcttcatattctgctagacagaagaattcttagaatcttccttgtgttgtgtgtattcaactcacacagttgaacgatggtttacacagagcagatttgaaacactctttttgtggaatttgcaagtggagatttcagccgctttgaggtcaatggtagaaaaggaaatatcttcgtataaaaactagacagaatgattctcagaaactcctttgtgatgtgtgcgttcaactcacagagtttaacctttcttttcatagagcagttaggaaacactctgtttgtaaactctgcaagtggatattcagacctctttgaggccttcgttggaaacgggatatcttcatactgtgctagacagaagaattcccagtaacttccttgcgttgtgtgtgttcaactcacagagttcaactttcatttacacagagcagatttgaaacactgtttttgtggaatttgcaagtggagatttcaagcgctttgaggccaaaggcagaaaaggaaatatcttcgtttcaaaaccagacagaatgattctcagaaactcctttgtgatgtgtgcgttcaactcacagagtttaacctttcttttcatagagcacttaggaaacactctgtttgtaaagtctgcaagtggatattcagacctctttgaggccttcgttggaaacgggtttttttcatataaggctagacagaagaattcccagtaacttccttgtgttgtgtacattcaactcacagagttgaaagttcccttagacagagcagatttgaaacactctttttgtgcaattggcaagtggagattacaagcactttaaggtcaatggcagaaaaggaaatatcttcgtttcaaaactagacagaatcattcccacaaactgcgttgtgatgtgttcgttcaactcacagtagtttaacctttccgttcatagagcagttaggaaacacactgtttgtaaagtctgtaagtggatattctgacatcttgtggccttcgttggaaacgggatttcttcatattctgctagacagaagaattctcagtaacttccgcgtgttgtgtgtattcaactcacagagttgaacgatcctttacacagagcagacttgaaacactctttttgtggaatttgcaagtggagatttcagcctctttgaagtcaatggtagaaaaggaaatatcttcctataaaaactagacagaatgattctcagaaactcctttgtgatgtgtgcgttcaactcacagagttcaacttttcttttcatagagcagttaggaaacactctgtttgtaaagtctgcaagtggatattcagacctctttgaggccttcgttggaaacgggatttcttcatattctgctagacagaagaattcctagtaacttccttgttttgtgtgtgttcaactcacagagttgaactttgatttacacagagcagatttgaatcactctttttgtggaatttgcaagtggagatttcaagcgctttgaggccaaaggcagaaaaggaaatatcttcgtataaaaactagacagagtaatcattctcagaaactgctgcgtgatgtgtgcgttcaactctcacagtttaacttttcttttcattcagcggtttggaaacactctgtttgtaaagtctgcacgtggatattttgaccacttagaggccttcgttagaaactggtttttttcatgtaaggctagacagaagaattcccagtaacttcccttgtgttgtgtgcattcaactcacagagttgaacgttcccttagacagagcagatttgaaacactctatttgtgcaatttgcaagtgtagatttcaagcgctttaaggtcaacggcagaaaaggaaatatcttcgtttcaaaactagacagaatcattcccacaaactgcgttgtgatgtgttcgttcaactcacagagtttaacctttctgttcatatagcagttaggaaacactctcaaaagtctgtaagtggatattctgacatcttgtggccttcgttggaaacgggatttcttcatattctgctagacagaagaattctcagtaacttccttgtgttgggtgtattcaactcacagagttgaaggatcctttacagagagcaggcttgaaacactctttttgtcgaatttgcaagtggagatttcagccgctttgaggtcaatggtagaataggaaatatcttcttatagaaactagacagaatgattctcagaaactcctttgtgatgtgtgcgttcaactcacagagtttaacctttcttttcatagagcagttaggaaacactctgtttgtaaagtctgcaagtggatattcagacctccttgaggccttcgttggaaacaggtttttttcatataaggctagacagaagaattctcagtaacttccttgtgttgtgtgtattcaactgacagagttgaactttcatttagagagagcagatttgaaacactgtttttgtggaatttgcaagtggagatttcaagcgctttagggccaaaggcagaaaaggaaatatcttcgtataaaaactagacagaaatgattctcagaaactcctttgtgatgtgtgagttcaactcacagagtttatcctttcttttcatagagcagttaggaaacactctgtttgtaaagtctgcaagtggatattcagacctctttgaggccttcgttggaaacgggatttcttcatattctgctagacagaagaattcccagtaacttccttgtgttgtgtgcattcaactcacagagttgaacattcccttgacagagcagatttgaaacactctatttgtgcaatttgcaagtgtagatttcaagcgctttaaggtcaatggcagaaaagggaatatcttcgtttcaaaactagacagaatgattctgagaaactcctttgtgatgtgtgcgttcaactgacagagtttaacctttcttttcatagagcagttaggaaacactctgtttgtaaagtctgcaagtggatattcagacatccttgaggctttcgttggaaacgggatttcttcatattctgctagaaagaagaattctcagtaacttccttgtgttgtgtgtattcaactcacagagttgaatgatcctttacacagaacagtcttgaaacactctttttgtggaatttgcaagtggagatttcagccgctttgaggtcaatggtagaataggaaatatcttcatatagaaactagacagaatgattctcagtaactcctttgtgatgtgtgcgttcaactcacagagtttaacctttcttttcatagagcagttaggaaacactctgtttgtaaagtctccaagtggatattcagacctctttgaggccttcgttggaaacgggtttttttcatataaggctagacagaagaattcccagtaacttccttgtgttgtgtgtgttcagctcacagagttgaactttcatttacacagagcagatttgaaacactctttttgtggaatttgcaggtggagatttcaagcgctttgaggccaaaggcagaaaaggaaatatcttcgtataaaaactagacagaagcattctcagaaactgctctgcgatgtgtgcgttcaactctcagagtttaacttttcttttcattcagcagtttggaaacactctgtttgtaaagtctgcacgtggataacttgaccacttagaggccttcgttggaaacgggtttttttcatgtaaggctagacagaagaattcccagtaacttccttgtgttgtgtacattccactcacagagttgaacgttcccttagacagagcagatgtgaaacactctttttgtgcaattggcaagtggagatttcaagcgctttaaggtcaaaggcagaaaaggaaatatcttcgtttcaaaactagacagaatcattcccacaaactgcgttgtgatgtgttcgttcaactcacagggattaacctttcttttcatagagcagttaggaaacagtctgtttgtcaattctgtaagtggatattctgacatcttgtggccttcgttggaaacgggatttcttcatattctgctagacagaagagttctcagaaacttccttgtgttgtgtgtattcaactcacagagttgaactatcgtttacacagaacagacttgagacactctttttgtggaatttgtaagtggagatttcagccgctttgaggtcaatggtagaaaaggaaatatcttcatataaaaactagacagaatgattctcagaaactcctttgtgatgtgtgcgttcaactcacagagtttaacctttcttttcatagagcagttaggaaacactctgtttgtaaagtctgcaagtggatattcagacatctttgaggctttcgttggaaacaggatttcttcatattctgctagacagaagaattccagtaacttccttgtgttgtgtgtgttcaactcacagatttgaactttcatttacacagagcagatttgaaacactctttttgtggaatttgcaaatggagatttcaagcgctttgaggccaaaggcagaaaaggaaatatcttcgtataaaaactagacagaatcattctcagaaactgctctgcgatgtgtgcgttcaactctcagagtttaactttgcttttcattcagcagtttggaaacactctgtttgtaaagtctacacgtggatattttgaccacttagaggccttcgttggaaacgggtttctttcctataaggctagacagaagagttctcagtaacttccttgtgttgtgtgtattcaactcacacagttgaacgatcctttatagagagcagacttgtaacactctttttgtggaatttgcaagtggagatttcagccgctttgaagtcaaagtagaaaaggaaatatcttcctataaaaactagacagaatcattcccacaaactgcgttgtgatgtgttcgttcatctcacagagtttaacctttcttttcatagagcagttaggaaacactctgtttgtaaattctgtaagtggatattctgacatcatgtggccttcgttggaaacgggatttcttcatattctgctagacagaagaattctcagtaacttccttgtgttgtgtgtattcaacccacagagttgaacgatcctttacacagagcagacttgaaacactctttttgtggaatttgcaagtggagatttcagccgctttgaggtcaatggtagaaaaggaaatatcttcgtataaagactagacagaatgattctcagaaactcctttgtgatgtgtgcgttcaactcacagagtttaacctttcttttcatagagcagttaggaaacactctgtgtgtaaagtctgcaagtggatattcagacctccttgaggccttcgttggaaacgagatttcttcataatatgctagacagaagaattctcagtaacttccttgtgttgtgtgtattcaactcacagagttgaaccatcctttacagagagcagacttgaaacactctttttgtggaatttgcaagtggagatttcagccgctttgaggtcaatggtagaataggaaatatcttcctatagaaactagacagaatgattctcagaaactcctttgtgatgtgtgcattcaactcacagagtttaacttttcttttcatagagccgttaggaaacactctgtttgtaaagtctgcaagtggatattcagacctctttgaggccttcgttggaaacgggatttcttcatattatgctagacagaagaattcccggtaacttccttgtgttgtgtgtgttcaactcacagagttgaactttgatttacacagagcagatttgaaacactctttttgtggaatttgcaagtggagatttcaagcgctttgaggccaaaggcagaaaaggaaatatcttcgtataaaaactagacagaatcattctcagaaactgctctgcgatgtgtgcgttcaactctcagagtttaacttttcttttcattcagcagtttggaaacactctgtttgtaaagtctgcacgtggatattttgaccacttagaggccttcgttggaaacgggtttttttcctgtaaggctagacagaagaattcccagtaacttccttgtgttgtgtgcattcaactcacagagttgaacgttcccttagacagagcagatttgaaacactctatttgtgcaatttgcaagtgtagttttcaagctctttaaggtcaacgacagaaaaggaaatatcttggtttcaaaactagacagaatcattcccacaaactgcgttgtgatgtgttcgttcaactcacagagtttaacctttctgttcatagagcagttaggaaacactctgtttgtaaagtctgtaagtggatattctgacatcttgtggccttcgttggaaacgggatttcttcctattctgctagacagaagaattctcagtaacttccttgtgttgtgtgtattcaactaacagagttgaacgatcctttacacagagcagacttgaaacactctttttgtggaatttgcaagtggagatttcagccgctttgaggtcaatggtagaaaaggaaactatcttcatataaagactagacagaatgattctcagaaactcctttgagatgtgtgtgttcaactcacagagtttaacctttcttttcatagagcagttaggaatcactctgtttgtaaagtctgcaagtggatattcagacctctttgaggccatcgctggaaacgggtttttttcatataaggctagacagaagaattcccaataacttccttgtgttgtgtgtgttcaactcacagagttgaactttcatttacacagagcagatttgaaacactctttttgtggaatttgcaagtggagatttcaagcgctttgaggccaaaggcagaaaaggaaataccttcgtataaaaactagacagaatgattctcagaaactcctttgtgatgtgtgcgttcaactcacagagtttaacctttcttttcattcggcggtttggaaacactctgtttgtaaagtctgcacgtggatattcagacctctttgaggccttcgttggaaacgggtttttttcatgtaaggctagacagaagaattcccagtaacttccttgtgttgtgtgcattcaactcacagagttgaacgttcccttagacagagcagatttgaaacactctatttgtgcaatttgcaaatgtagatttcaagcgctttaaggtcaacggcagaaaaggaaatatcttcgtttcaaaactagacagaatcattcccacaaactgcgttgtgatgtgttcgttcaactcacagagtttaacctttcttttcatagagcagttaggaaacagtctgtttgtcaattctgtaagtggatattctgacatcttgtggccttcgttggaaacgggatttcttcatattctcctagacagaagaattctcagtaacttccttgtgttgtgtgtattcaactcacagagttgaacgatcctttacacagagcagacttgaaacactcgttttgtggaatttgcaagtggagatttcagccgctttgaagtcaatggtagaaaaggaaatatcttcgtataaaaactagacagaaagattctcataaactcctttgtgatgtgtgcgttcaactcacagagtttaacctttcttttcatagagcagttaggaaacactctgtttgtaaagtctgcaagtggatattcagacctctttgaggccttcgttggaaacgggatttcttcatattatgctagacgggaagaattctcagtaacttccttgtgttgtgtgtattcaactgacagagttgaactttcatttagagagagcagatttgaaacactgtttttgtggaatttgcaagtggagatttcaagcgctttggggccaaaggcagtaaaggaaatatcttcgtataaaaactagacagaatcattctcagaaactgctctgcgatgtgtgcgttcaactctcagagtttaacttttcttttcattcagcagtttggaaacactctgtttgtaaagtctgcacgtggatattttgaccacttagaggccttcgttggaaacgtgtttttttcctgtaaggctagacagaagaattcccagtaacttccttgtgttgtgtacattcaactcacagagttgaacgttcccttagacagagcagatttgaaacactctttttgtgcaattggcaagtggaaatttcaagcgctttgaggtcaatggcagaaaaggaaatatcttcgtttcaaaactagacagaaatcattcccacaaactgcgttgtgatgtgttcgttcaactcacagaagtttaacctttcttttcatagagcagttaggaaacactctgttggtaaaatctgtaagtggatattctgacatcttgtggccttcgttggaaacgggatttcttcatattctgctagacagaagaattctcagtaacttccttgtgttgtgtgtattgaactcgcagagttgaacgatcctttacacagagcagacttgaaacactctttttgtggaatttgcaagtggagatttcagccgctttgaggtcaatagtagaaaaggtaatatcttcgtagaaaaactagacagaatgattctcagaaactcctttgtgatgtgtgcgttcaactcacagagtttgacctttcttttcacagagcagttaggaaacactctgtttgtaaagtctgcaagtggatattcagacctctttgaggccatagttggaaacgggatttcttcatattctgctagacagaagaattctcagtaacttccttgtgttgtgtgtattcaactgacagagttgaactttcatttagagagagcagatttgaaacactgtttttgtggaatttgcaagtggagatttcaagcactttggggccaaaggcagaaaaggaaatatcttcgtataaaaactagacagaatcattctcagaaactgctctgcgatgtgtgcgttcaactctcagagtttaacttttcttttcattcagcagtttgcaaacactctgtttgtaaagtctgcacgtggatattttgaccacttagaggccttcgttggaaacgggtttttttcctgtaaggctagacagtagaattcccagtaacttccttgcgttgtgtacattcaactcacagagttgaacgttcccttagacagagcagatttgaaacactctttttgtgcaattggcaagtggagatttcaagcgctttaaggtcaatggcagaaaaggaaatatcttcgtttcaaaactagacagaatcattcccacaaactgcgttgtgatgtgttcgttcaactcacagtagtttaacctttctgttcatagagctgttaggaaacactctgtttgtaaagtctgtaagtggatattctgacatcttgtggccttcgttggaaacgggatttcttcatattctgctagacagaagaattctcagtaacttccttgtgttgtgtgtattcaactcacagagttgaacgatcctttacacagagcatacttgaaacactctttttgtggaatttgcaagtggagatttcagccgctttgatgtcaatggtagaaaaggaaataacttcgtataaagactagacagaatgattctcagaaactcctttgtgatgtgtgcgttcaactcacagagtttaacctttcttttcatagagcagttaggaaacactgtgtttgtaaagtctgcaagtggatattcagacctctttgaggccttcgttggaaacgggtttttttcatataaggctagacagaagaattctcagtaacttgcttttgttgtgtgtattcaactgacagagttgaactttcatttagacagagcagatttgaaactctctttttctggaatttgcaagtggagatttcaagcgctttgaggccaaaggcagaaaaggatatatcttcgtataaaaactagacagaatcattctcagaaactgctctgcgatgtgtgccttcaactctcagagtttaacttttcttttcattcagcagtttggaaacactctgtttgtaaagtctgcacgtggataatttgaccacttagaggccttcgttggaaacgggtttttttcatgtaaggctagacagaagaattcccaataacttccttgtgttgtgtgcattcaactcacagagttgaacgttcccttagacagagcagatttgaaacactctatttgtgcaatttgcaagtgtagatttcaagcgctttaaggtcaatggcagaaaaggaaatatcttcgtttcaaaactagacagaatgattctcagaaactcctctgtgatgtgtgcgttcaactcacagagtttaacttttcttttcatagagcagttaggaaacactctatttgtaaagtctgcaaggggatattcagacctctttgaggccttcgttggaaacgggatttcttcatattctgctagacagaagaattctcagtaacttccttgtgttgtgtgtattcaactcacagagttgaacgatcctttacacagagcagacttgaaacactctttttgtggaatttgcaagtggagatttcagccgctttgaggtcaatggtagaaaaggaaatatcttcgtatagaaacaagacagaatgattctcagaaactcctttgagatgtgtgcgctcaactcacagagtttaacctttcttttcatagagcagttaggaaacactctgtttgtaaagtctgcaagtggatattcagacctctttgaggccttcgttggaaacgggtttttttcaaataaggctagacagaagaattctcagtaacttccctgtgttgtgtgtattcaactgacagagtcgaactttcatttagagagagcagatttgtaacattgtttttgtggaatttgcaagtggagatttcaagcgctttggggccaaaggcagaaaatgaaatatcttcgtataaaaactagacagaatcattctcagaaactgctctgcgatgtgtgcgttcaactctcagagtttaacttttcttttcattcagcagtttggaaacactctgtttgtaaagtctgcacgtggatattttgaccacttagaggccttcgttggaaacgggtttttttgcctgtaaggctagacagaaagaattcccagtaacttccttgtgttgtgtacattcaactcacggagttgaacgttcccttagacagagcagatttgaaacactctttttgtgcaattggcaaatggagatttcaagcgctttaaggtcaatggcagaaaaggaaatatcttcgtttcaaaactagacagaatgattctcagaaactcctttgtgatgtgtgcgttcaactcacagagtttaacctttcttttcatagagcagttgggaaacactctgtttgtaaagtctgcaagtggatattcagacatccttgaggctttcgttggaaaagggatttcttcatattctgctagacagaagaattctcagtaacttccttgtgttgtgtgtattcaactcacacagttgaacgatcctttacacagagcagacttgaaacactctttttgtggaatttgcaagtggagatttcagccgctttgaggtcaatggtagaataggaaatatcttcctatagaaactagacagaaagattctcagaaactcctttgtgatgtgtgcgttcaactcacagagtttaacctttcttttcatagagcagttaggaaacactctgtttgtaaagtctgcaagtggatattcagacctctttgaggccttcgttggaaacgggtttttttcatataaggctagacagaagaattctcagtaacttccttgtgttgtgtgtattcaactgacagagttgaactttcatttagagagagcagatttgaaacactgtttttgtggaatttgcaagtggagatttcaagcgctttgggaccaaaggcagaaaaggaaatatcttcgtatataaactagacagaatcattctcagaaactgttctgcgatgtgtgcgttcaactctcagagtttaacttttcttttcattcagcagtttggaaacactctgtttgtaaagtctgcacgtggatattttgaccacttagaggccttcgttggaaacgggtttttttcctgtaaggctagacagaagaattcccagtaacttccttgtgttgtgtacattcaactcacagagttgaacgttcccttagacagagcagatttgaaacactctttttgtgcaattggcaagtggtgatttcagccgctttgaggtcaatggtagaaaaggaaatatcttcgtataaaaactagacagaatcattcccacaaactgcgttgtgatgtgttcgttcaactcacagagtttaacctttcttttcctagagcagttaggaaacagtctgtttgtaaattctgtaagtggatattctgacatcttgtggccttcgttggaaacgggatttcttcatattctgctagacagaagaattctcagtaactttccttgtgttgtgtgtattcaactcacagatttgaacgatcctttacacagagcagacttgtaacactctttttgtggaattcgcaagtggagatttcagcagctttgaagtcaaaggtagaaaaggaaatatcttcctataaaaactagacagaatgattctcagaaactcctttgtgatgtgtgtgttcaactcacagagtttaacttttcttttcctagagcagttagtaaacactctgtttaaaaagtctgcaagtggatattcagacccctttgaggccttcgttggaaacgggatttcttcatattatggtagacagaagaattctcagtaacttccttgtgttgtgtgtattcaactcacagagttgaacgatccttttcacagagcagacttgaaacactctttttgtggaatttgcaagtggagatttcagccgctttgaggtcaatggtagaaaagggaatatcttcgtatagaaactagacagaatcattctcagaaactgctctgcgatgtgtacgttgaactctcagagtttaacttttcttttcattcagcagtttggaaacactctgtttgtaatgtctgcacgtggataatttgaccacttagaggccttcgttggaaacgggtttttttcatgtaaggctagacagaagaattctcagaaacttccttgtgttgtgtgtactcaactcacagagttgaacgatcctttacacagagcagacttgaaacactctttttgtggaatttgcaagtgtagatttcaagcgctttaaggtcaatggcagaaaaggaaatatcttcgtttcaaaactagacagaatcattcccacaaactgcgttgtgatgtgttcgttcaactcacagaatttaacctttctgttcatagagcagttaggaaacactctgtttgtaaagtctgtaagtggatattctgacgtcttgtggccttcgttggaaacgggatttcttcatattctgctggacagaagaattctcagtaacttccttgtgttgtgtgtattcaactcacagagttgaacgatcctttacagagagcagacttgaaacactctttttgtggaatttgcaagtggagatttcagcctctttgaggtcaatggtagaataggaaatatcttcctatagaaaccagacagaatgattctcagaaactcctttgtgatgtgtgcgttcaactcacagagtttaacctttcttttcatagggcagttaggaaacactctgtttgtaaagtctgcaagtggatattcagacatccttgaggctttcgttggaaacgggatttcttcatattctgctagaaagaagaattcccagtaacttccttgtgttgtctgtgttcaactcacagagttgaactttcatttacacagagcagatttgaaacactctttttgtggaatttgcaaatggagatttcaagcgctttgaggccaaaggcagaaaaggaaatatctttgtataaaaactagacagaatcattctcagaaactgctctgtgatgtgtgcgttcaactctcagagtttaacttttcttttcattcagcagtttggaaacactctgtttgtaaagtctgcacgtggataatttgaccacttagaggccttcgttggaaacgggtttttttcatgtaaggctagacagaagaattctcagtaacttcccttgtgttgtgtgtattcaactcacagagttgaacgatcctttacacagagcagacttgtaacactctttttgtggaatttgcaagtggagatttcagccgctttgaagtcaaaggtagaaaaggaaatatcttcctattaaaactagacagaatgattctcagaaaatcatttgtgatgtgtgcgttcaactcacagagtttaacttttcttctcatagagcagttaggaaacactctgtttgtaaagtctgcaagtggatattcagacctctttgaggccttcgttggaaacgggatttcttcatattctgctagacagaataattcccagtaacttccttgtgttgtgtgtattcaactcacagagttgaatgatcctttacacagagcagacttgaaacactctttttgtggaatttgcaagtggagatttcagccgctttgaggtcaatggtagaaaagtaaatatcttcgtataaagactagacagaatgattctcagaaactcctttgtgatgtgtgcgttcaactcacagagtttaacatttcttgtcatagagcagttaggaaacactctgtttgtaaagtctgcaagtggatattcagacctccttgaggccttcgttggaaacgagatttcttcatattatgctagacagaagaattctcagtaacttcccttgtgttgtgtgtattcaactgacagatttgaactttcatttagagagagcagatttgaaacactgtttttgtggaatttgcaagtggagatttcaagcgctttggggccaaaggcagaaaaggaaatatcttcgtataaaaactagacagaatcattctcagaaactgctgcgtgatgtgtgcgttcaactctcagagtttaacttttcttttcattcagcggtttggaaacactctgttcgtaaagtctgcacgtggatattttgaccacttaggggccttcgttggaaacgggtttttttcatgttaggctagacagaagaattcccagtaacttccttgtgttgtgtacattcaactcacagagttgaacgttcccttagacagagcagatttgaaacactctttttgtgcaattggcaaatggtgatttcaagcgctttaaggtcaatggcagaaaaggaaatatcttcgtttcaaaactagacagaatcattcccacaaactgcgttgtgatgtgttcgttcaactcacagagtttaacctttctgttcatagagcagttaggaaacactctgtttgtaaagtccgtaagtggatattctgacatcttgtggccatctttggaaacgggatttcttcatagtctgctagacagaagagttctcagtaacttccttgtgttgtgtgtattcaactcacacagttgaacgatcctttacagagagcagacttgtaacactctttttgtggaatttgcaagtggagatttcagccgctttgaagtcaaagtagaaaaggaaatatcttcctataaaaacaagacagaatgattctcagaaactcctttgtgatgtgtgagttcaactcacagagtttaacctttcttttcatagagcagttaggaaacactctgtttgtaaagtctgcaagtggatattcagacctctttgaggccttcgttggaaacgggtttttttcatataaggctagacagaagaattcccagtaacttccttgtgttgtgtgtgttcaactcacaaagttgaactttcatttacacagagcagatttgaaacactctttttgtggaatttgcaaatggagatttcaagcgctttgaggccaaaggcagaaaaggaaatatcttcgtataaaaactagacagaatcattctcagaaactgctctgcgatgtgtgcgttcaactctcagagtttaacttttcttttcattcagcagtttggaaacactctgtttgtaaagtctgcacgtggataatttgaccacttggaggccttcgttggaaacggatttttttcatgtaaggctagacagaagaattcccagtaacttccttgtgttgtgtgtgttcaactcacagagttgaactttcatttacacagagcagatttgaaacactctttttgtggaatttgcaagtggagatttcaagcgctttaaggtcaatggcagaaaaggaaatatcttcgtttcaaaactagacagaatcattcccacaaactgcgttgtgatgtgttcgttcaactaacagagtttaacctttctgttcatagagcagttaggaaacactctgtttgtaaagtctgtaagtggatattctgacatcttgtggccttcgttggaaacgggatttcttcatattctgctagacagaagaattctcagaaacttccttgtgttgtgtgtattcaactcacagagttgaacgatcgtttacacagagcagacttgagacactctttttgtagaatttgtaagtggagatttcagccgctttgaggtcaatggtagaaaaggaaatatcttcatataaaaactagacagaatgattctcagaaactcctttgtgatgtgtgtgttcaactcacagagtttaacctttcttttcatagagcagttagtaaacactctgtttataaagtctgcaagtggatattcagaccccttggaggccttcgttggaaacgggatttcttcatattatgctacacagaagaattcccggtaacttctttgtgttgtgtgtgttcaactcacacagttgaactttcatttacacagagcagatttgaaacactctttttgtggaatttgcaagtggagatttcaagcgctttgaggccaaaggcagaaaaggaaatatcttcgtttcaaaactagacagaatcattctcagaaactgctgcgtgatgtgtgcgttcaactctcagagtttaacttttcttttcattcagcggtttggaaacactctgtttgtaaagtctgtgcgtggatattttgaccacttagaggccttcgttggaaacgggtttttttcatgtaaggctagacagaagaattcccactaacttccttgtgttgtgtgcattcaactcacagacttgaacgttcccttagacagagcagatttgaaacactctatttgtgcaatttgcaagtgtagatttcaagcgctttaaggtcaatggcagaaaaggaaatatcttcgtttcaaaactagacagaatgattctcagaaacttctttgtgatgtgtgcgttcaactcacagagtttaacctttcttttcatagagcagttaggaaacactctgtttgtaaactctgcaagtggatgttcagacctgtttgaggccttcgttggaaacgggatttcttcatactattctagacagaagaattctcagtaacttccttgtgttgtgtgtattcaactcatagagttgaacgatcctttacacagagcagacttgtgacactctttttgtggaatttgcaagtggagatttcacccgctttgacgtcaaaggtagaaaaggaaatatcttcctataaaaactagacagaatgattctcagaaacttctttgtgatgtgtgcgttcaactcacagagtttaacctttcttttcatagagcagttaggaaacactctgtttgtaaactctgcaagtggatattcagacctctttgaggccttagttggaaacgggatttcttcatactgtgctagacagaagaattctcagtaacttccgagtgttgtgtgtattcaactcacagagctgaacgatcctttacacagagcagacttgaaacactctttttgtggaatttgcaagtggagatttcagccgctttgaggtcaatggtagaaaaggaaatatcttcgtataaaaactagacagaagcattctcaaaaactgctctgtgatgtgtgcgttcaactctcagagtttaattttcttttcattcagcagtttgtaaacactctgtttgtaaagtctgcacgtggatattttgaccacttagaggccttcgttggaaacgagtttttttcatgtaaggctagacagaagaattcccagtaacttccttgtgttgtgtgtattcaactcacagagttgaacgttcccttagacagagcagatttgaaacactctatttgtgcaatttgcaagtgtagatttcaagcgctttaagttcaatggcagaaaaggaaatatcttcgtttcaaaactagacagaatcattctcagaaactgctgtgcgatgtgtgtgttcaactctcagagtttaactttgcttttcattcagcagtttggaaacactctgtttgtaaagtctgcacgtggataatttgaccacttagaggccttcgttggaaacgggtttttttcatgtaaggctggacagaagaattctcagtaacttccttgtgtggtgtgtattcaactcacagagttgaacgatcctttacacagagcagacttgtaacactctttttgtggaatttgcaagtggagatttcagccgctttgaagtcaaaggtagaaaaggaaatatcttcctataaaaactacacagaatgattctcagaaaatcttttgtgatgtgtgcgttcaactcacagagtttaacttttcttctcatagagcagttaggaaacactctgtttgtaaagtctgcaagtggatattcagaccactttgaggccttcgttggaaacgggatttcttcatattatgctagacagaagaattcccagtaacttccttgtgttgtgtgtgttcaactcatagagttgaactttgatttacacagagcagatttgaaacactctttttgtggaatttgcaagtggagatttcaagcgctttgaggccaaaggcagaaaaggaaatatcttcgtataaaaactagacagaatcattctcagaaactgctctgcaatgtgtgcgttcaactctcagagtttaacttttcttttcattcagcagtttggaaacactctgtttgtaaagtctgcacgtggatattttgaccacttagaggccttcgttggaaacgggtttttttcctgtaaggctagacagaagaattcccagtaacttccttgtgttgtgtacattcaactcacagagttgaacgttcccttagacagagcagatttgaaacactctttttgtgcaattggcaaatggagatttcaagcgctttaagttcaatggcagaaaaggaaatatcttcgtttcaaaactagacagaatcattcccacaaactgcgttgtgatgtgttcgttcaactcacagagtttaacctttcttttcatagagcagttaggaaacagtctgtcaattctgtaagtggatattctgacatcttgtggcattcgttggaaacgggatttcttcatattctgctagacagaagaattctcagaatcttccttgtgttgtgtgtattcaactcacagagttgaacgatcctttacacagagcagacttgaaacactctttttgtggaatttgcaagtggagatttcagctgctttgaggtccatggtagaaaaggaaatatcttcgtataaaaactagacagaatgattctcagaaactcctttgtgatgtgtgtgttcaactcacagagtttaaactttctgttcatagagcagttaggaaacactctgtttgtaaagtctgcaagtggatattcagacctccttgaggccttcgttggaaacgggatttcttcatattctgctagacagaagaattctcagtaacttccttgtgttgtgtgtattcaactgacagagttgaactttcatttacacagagcagatttgaaacactctttttgtggaatttgcaaatggagatttcaagcgatttgaggccaaaggcagaaaaggaaatatcttcgtataaaaactagacagaatcattctcagaaactgctgcgtgatgtgtgcgttcaactctcagagtttaacttttcttttcattcagcggtttggaaacactctgtttgtaaaaactgcacgtggatattttgaccacttagaggccttcgttggaaacgggtttttttcatgtaaggctagacagaagaattcccagtaacttccttgtgttgtgtgcattcaactcacagagttgaacgttcccttagacagagcagatttgaaacactctatttgtgcaatttgcaagtgtagttttcaagctctttaaggtcaacggcagaaaaggaaatatcttcgtttcaaaactagacagaatgattctcataaactcctttgtgatgtgtgcgttcaactcacagagtttaacctttcttttcatagagcagttaggaaacactctgtttgtaaagcctgcaagtggatattcagacctccttgaggccttctttggaaacgggatttcttcatattctgatagacagaagaattctcagtaacttccttgtgttgtgtgtattcaactcacagagttgaacgatcctttacccagagcagacttgaaacaccctttttgtggaatttgcaagtggagatttcagccgctttgaggtcaatggtagaaaaggaaatatcttcgtataaagactagacagaatgattctcagaaactcctttgtgatgtgtgtgttcaactcacagagtttaacctttcttttcatagagcagttcgtaaacactctgtttataaagtctgcaagtggatattcagacccctttgaggccttctttggaaacgggatttcttcatattatgctagacggaagaattccccgtaacttccttgtgttgtgtgtgttcaactcacagagttgaactttcatttacatagagcagatttgaaacactctttttatggaatttgcaagtggagatttcaagcgctttgaggccaaaggcagaaaaggaaatatcttcgtataaaaactagacagaatcattctcagaaactgctctgcgatgtgtgcgttcaactctcagagtttaacttttcttttcattcagcagtttggaaacactctgtttgtaaagtctgcacgtggataatttgaccacttagaggccttctttggaaacgggtttttttcatataaggctagacagaagaattcccagtaacttccttgtgttgtgtacattcaactcacagatttgaacgctcccttagacagagcagatttgaaacactctttttgtgcaattggcaattggagatttcaagcgctttaaggtcaatggcagaaaaggaaatatcttcgtttcaaaactagacagaatgattctcagaaacttctttgtgatgtgtgcgttcaactcacagagtttaacctttcttttcatagagcagttaggaaacactctgtttgtaaactctgcaagtggatatttagacctctttgaggccttcgttggaaacgggattttttcatactgtactagacagaagaattctcagtaacttccttgtgttgtgtgtattcaactcacagagttgaaagatcctttacacagagcagacttgaaacactctttttgtggaatttgcaagtggagatttcaaccgctttgaggtcaatagtacaaaaggaaatatcttcgtagaaaaactagacagaatgattctcagaaactcctttgtgatgtgtgcgttcaactcacagagttcaacctttcttttcatagagcagttgggaaacactctgtttgtaaagtctgcaagtggatattcagacctccttgaggccttcgttggaagcgggatttcttcatcttctgctagacagaagaattctcagtaacttccttgtgttttgtgtattcaactgacagagttgaactttcatttagagagagcagatttgaaacactgtttttgtggaatttgcaagtggagatttcaagcgctttggggccaaaggcagaaaaggaaatatcttcgtataaaaactagacagaatgattctcagaaacttctttgtgatttatgcgttcaactcacagagttaaaactttcttttcatagagcagttaggaaacactctgtttgtaaagactgcacgtggatattcagacctctttgaggccttcgttggaaacgggtttttttcctgtaaggctagacagaagaattcccagtaacttccttgtgttgtgtgcattcaactcacagagttgaacgttcccttagacagagcagatttgaaacactctatttgtgcaacttacaagtgtagttttcaagctctttaaggtcaacggcagaaaaggaaatatcttcgtttcaaaactagacagaatcattaccacaaactgcgttgtgatgtgttcgttcaacccacagagtttaagctttctcttcatagagcagttaggaaacactctgtttgtgaagtctgtaagtggatattctgacatcttgtggccttcgttggaaacgggatttcttcatattctgctagacagaagaattctcagtaacttccttgtgttgtgtgtattcaactcacagagttgaacgatcctttacacagagcagagttgaaacattctttttgtggaatttgcaagtggagatttcagccgctttgaggtcaatggtagaatagcaaatatcttcctatagaaactagacagaatgattcttagaaactcctttgtgatgtgtgtgttcaactcacagagtttaacctttcttttcatagagcagttagtaaacactctgtttataaagtctgcaagtggatattcagacccctttgaggccttcgttggaaacgggatttcttcatattatgctagacagaagaattctcagtaacttccttgtgttgtgtgtattcaactcacagagttgaacgatcctttacacagagcagacttgaaacactctttttgtggaatttgcaagtggagatatcaagcgctttggggccaaaactagacagaatcatgctcagaaactgctctgcgatgtgtgcgttcaactctcagagtttaacttttcttttcattcagcagtttggaaacactctgtttgtaaagtctgcacttgcataatttgaccgcttagaggccttcgttggaaacgggtttttttcatgtaaggctagacagaagaattcccagtaacttccttgtgttgtgtgcattcaactcacagagttgaacgttcccttagacagagcagatttgaaacactctatttgtgcaatttgcaattgtagttttcaagctctttaaggtcaacggcagaaaaggaaatatcttcgtttcaaaactagacagaatcattcccacaaactgcgttgtgatgtgttcgttcaactcacagagtttaacctttctgttcatagagcagttaggaaacactctttttgtaaagtctgtaagtggatattctgacatcttgtggccttcgttagaaacgggattttttcatattctgctagacagaagaattctcagtaacttccttgtgttgtgtgtattcaactcacagagttgaacgatcctttacacagagcagacttgtaacactctttttgtgtaatttgcaagtggagatttcagccgctttgaagtcacaggtagaaaaggaaatatcttcctataaaaactagacagaatgattctcagaaactcctttgtgatgtgtgcgttcagctcacagagtttaacctttcttttcatagagcagttcggaaacactctgtttgtaaagtctgcaagtggatattcagacctctttgaggccttcgttggaaacgggatttcttcatattctgctagacagaagattcccagtaacttccttgtgttgtgtgtgttcaactcacagagttgaactttgatttacacagagcagatttgaaacactctttttgtggaatttgcaagtggagatttcaagcgctttgaggccaaaggcagaaaaggaaatatcttcgtataaaaactagacagaatcattctcagaaactgctctgcgatgtgtgcgttcaactctcagagtttaacttttcttttcattcagcagtttggaaacactctgtttgtaaagtctgcaggtggatactttgaccacttagagaccttcgttggaaacgggtttttttcctgtaaggctagacagaagaattcccagtaacttccttgtgttgtgtgcattcaactcacagagatgaacgttcccttagacagagcagatttgaaacactctatttgtgcaatttgcaagtgtagatttcaagcgctttaaggtcaatggcagaaaaggaaatatcttcgtttcaaaactagacagtatcattcccacaaactgcgttgtgatgtgttcgttcaactcacagagtttaacctttcttttcatagagcagttaggaaacagtctgtttgtaaattctgtaagtggatattctgacatcttgtggccttcgttggaaacgcgatttcttcatattctgctagacagaagaattctcagaatcttccttgtgttgtgtgtattcaactcaaagagttgaacgatcctttacacagagcagacttgaaactctctttttgtggaatttgcaagtggagatttcagccgctttgaggtccatggtagaaaaggaaatatcttcgtataaaaactagacagaatgattctgagaaactcctttgtgatgtgtgcgttcaactcacagagtttaacctttcttttcatagagcagttaggaaacactctgtttttaaagtctgcaagtggatattcagacctccttgaggccttcgttggaaacgggatttcttcatattatgctagacagaagaattccagtaacttccttgtgttttgtgtgttgaactcacagagttgaactttcatttacacagagcagatttgaaacactctttttgtggaatttgcaagtggagatttcaagggctttgaggccaaaggcagaaaaggaaatatcttcgtttcaaaactagacagaatcattctcagaaactgctgcgtgatgtgtgcgttcaactctcagagtttaagttttcttttcattcagcggtttggaaacactctgtttgtaaagtctgcacgtggaaattttgaccacttagaggccttcgttggaaacgggtttttttcatgtaaggctagacagaagaattcccagtaacttccttgtgttgtgtgcattcaactcacagagttgaacgttcccttagacagagcagatttgaaacactctatttgtgcaatttgcaagtgtagttttcaagctctttaaggtcaatggcagaaaaggaaatatcttcgtttcaaaactagacagaatgattctcagaaactcctctgtgatgtgtgcgttcaactcacagagtttaacttttcttttcatagagcagttaggaaacactctgtttgtaaagtctacaagtggatattcagacctctgtgaggccctcgttggaaacgggatttcttcatattatgctagacagaagaattctcagtaacttccttgtgttgtgtgtattcaactcacagagttgaacgatcctttacacagagcagacttgaaacactctttttgtggaatttgcaagtggagatttcagccactttgaggtcaatagtagaaaaggaaatatcttcgtagaaaaactagacataatgattctcagaaacccatttgtgatgtgtgcgttccactcacagagtttaacctttcttttcatagagcagttaggaaacactctgtttgtaaagtctgcaaggggatatttagacctctttgaggccttcgttggaaacgggatttcttcatattctgctagacagaagaattctcagtaacttccttgtgttgtgtgtattcaactcacagagttgaactttcatttagagagagcagatttgaaacactgtttttgtggaatttgcaagtggagatttcaagcgctttgtggccaaaggcagaaaaggaaatatcttcgtataaaaactagacagaatcattctcagaaactgctctgcgatgtgtgcgttcaactctcagagtttaacttttcttttcattcaccagtttggaaacactctgtttgtaaagtctgcacgtggatattttgaccacttagaggccttcgttggaaacgggtttttttcctgtaaggctagacagaagaattcccaggaacttccttgttttgcgtacattcaactcacacatttgaacgttcccttagacagagtagatttgaaacactctttttgtgcaattggcaagtggtgatttcagccgctttgaggtcaatggtagaaaaggaaatatcttcgtataaaaactagacagaatgattctgagaaactcctttgtgatgtgtgcgttcaactcacacagtttaacctttcttttcatagagcagttaggaaacactctgtttgtaaagtctgcaagtggatattcagacgtccttgaggccttcgttggaaacgggatttcttcatattctgctagacagaagaattctcagtaaattccttgtgttgtgtgtattcaactcacagagttgaacgatcctttacacagagcagacttgaaactctctttttgtggaatttgcaagtggagatttcagccgctttgaggtcaatggtagaaaaggaaatatcttcgtatagaaacaagacagaatgattctcagaaacttctttgtgatgtgtgcgttcaactcacagagtttaacctttcttttcatggagcagttaggaaacactctgtttgtaaactctgcaagtggatattcagacctatttgaggccttcgttggaaacgggatttcttcatactgtgctagacagaagaattctcagtaacttccttgtgttgtgtgtttttaactgacagagttgaactttcatttagagagagcagatttgaaacactgtttttgtggaatttgcaagtggagatttcaagcgctgtggggccaaaggcagaaaaggaaatatcttcgtataaaaactagacagaatcattctcagaaactgctctgcgatgtgtgcgttcaactctcagagtttaacttttcttttcattcagctgtttggaaacactctgtttgtaaaatctgcacgtggacaatttgaccacttagaggccttcgttggaaacgggtttttttcatgtaaggctagacagaagaattctcagtaacttccttgtgtcgtgtgtattcaactcacagagttgaacgatcctttacacagagcagacttgtaacactctttttgtggaatttgcaagtggagatttcagccgctttgatgtcaaaggtagaaaaggaaatatcttcctataaaaactagacagaatcattcccacaaactgcgttgtgatgtgttcgttcaactcacagagtttaacctttctgttcatagagcagttaggaaacactctgtttgtaaagtctgtaagtggatattctgacatcttgaggccttcgttggaaacgggatttcttcatattctgctagacagaagaattcccagtaacttccttgtgttgtgtgcattcaactcacagagttgaacgatccttcacacagagcagattagaaacactctttttattggaatttgcaagtggagatttcagccgctttgaggtcaatggtagaaaaggaaatatcttcgtataaaaactagacagaatgattctcagaaactcctttgtgatgtgtgcgttcaactcacagagttcaacctttcttttcatagagcagttgggaaacactctgtttgtaaagtctgcaagtggatattcagacttctttgaggccttcgttggaagtgggatttcttcatgttctgctagacagaagaattctcagtaacttccttgtgttgtgtgtattcaactcacagagttgaacgatgctttacacagagcagacttgaaacactctttttgtggaatttgcaagtggagatttcagccgctttgtggtcaatagtagaataggaaatatcttcctatagaaactagacagaatgattctcagaaactcctttgtgatgtgtgcgttcaactcacagagtttaccctttcttttcatagagcagttaggaaacactctgtttgtaaagtctgcaagtggatattcagacatccttgaggctttcgttggaaacgggatttcttcatattctgccagaaagaagaattctcagtaacttccttgtgttgtgtgtattcaactcacagagttgaacgatcctttacacagtagcagacttgaaacactctttttgtggaatttgcaagtggagatttcagccgctttgaggtcaatggtagaataggaaatatcttcctatagaaactagacagaatcattctcagaaactgctgcgtgatgtgtgcgttcaactctcagagtttaacttttcttttcattcagcggtttggaaacactctgtttataaagtctgcacgtggatattttgaccacttagaggccttcgttggaaacgggttttttttcatgtaaggctacacagaagaatttccagtaacttccttgtgttgtgtgcattcaactcacagagttgaacgttcccttagacagagcagatttgaaacactctatttgtgcaatttgcaagtgtagatttcaagcgctttaaggtcaaaggcagaaaaggaaatatcttcgtttctaaactagacagaatcattcccacaaactgcgttgtgatgtgttcgttcaactcacagagtttaacctttctgttcatagagcagttaggaaacactctgtttgtaaagtctgtaagtggatattctgacatcttgcggccttcgttggaaacgggatttcttcatattatgctagacagaataattctcagtaacttccttgtgttttgtgtattcaactcacagagttgaacgatcctttacagagagcagagttgaaacactctttttgtggaatttgcaagtggagatttcagccgctttgaggtcaatggtagaaaaggaaatatcttcgtataaagactagacagaatgattctcagaaactcctttgtgatgtgtgagttcaactcacagagtttaacctttcttttcatagagcagttaggaaacactctgtttgtaaagtctgcaagtggatattcagacctctttgaggccttcgttggaaacgggatttcttcatattctgctagacagaagaattctcagtaacttccttgtattgtgtgtattcaactgacagagttgaactttcatttagagagagcagatttgaaatactgtttttgtggaatttgcaagtggagatttcaaacgctttggggccaaaggcagaaaaggaaatatcttcgtatgaaaactagacagaatcattctcagaaactgctctgcgatgtgtgcgttcgaactctcagagtttaacttttcttttcattcagcagtttggaaacactctgtttgtaaagtctgcacgtggatattttgaccacttagaggccttcgttggaaacgggtttttttcctgtcaggctagacagaagaattcccagtaacttccgtgtgttgtgtacattcaactcacagagttgaacgttcccttagacagagcagacttgtcacactctttttgtggaatttgcaagtggagatttcagccgctttgaagtcaaaggtagaaaaggaaatatcttcctataaaaactagacagaatgattctcagaaactcgtttgtgatgtgtgtgttcaactcacagagtttaacctttcttttcatagagcagttaggaaacactctgtttgtaaagtctgcaagtggatattcagacctctttgaggccttcgttggaaacggggttttttcatataaggctagacagaagaattctcagaaacttccttgtgttgtgtaatttcaactcacagagttgaacgatgctttacacagagtagacttgaaacactctttttgtggaatttgcaagtggagatttcagccgctttgaggtcaattgttgaaaaggaaatatcttcgtataaaaactagacagaatgattctcagaaactcctttgtgatgtgtgcgttcaactcacagagtttaacctttcttttcatagaggagttaggaaacactctgtttgtaaagtctgcaagtggatattcagacctctttgaggccttcgttggaaacgggtttttttcatataaggctagacagaagaattctcagtaacttccttgtgttgtgtgtattcaactgacagagttgaactttcatttagagagagcagattttaaacactgtttttgtggaatttgcaagtggagatttcaagcgctttggggccaaaggcagaaaaggaaatatcttcgtataaaaactagacagaatcattctcagaaactgctctgcgatgtgtgcgttcaactctcagagcttaacttttcttttcattcagcaatttggaaacactctgtttgtaaagtctgcacgtggataacttgaccacttagaggccttcgttggaaacgggtttttttcatgtaaggctagacagaagaattctcagtaacttccttgtgttgtgtgtattcaactcacagagttgaacgatcctttacacagagcagacttgtaacaccctttttgtggaatttgccagtggagatttcagccgctttgaagtcaaaggtagaaaaggaaatatcttcctataaaaactagacagaatcattcccacaaactgcgttgtgatgtgttcgttcaactcacggagtttaacctttcttttcatagagcagttaggaaacagtctgtttgaaaattctgtaagtggatattctgacagcttgtggccttcgttggaaacgggatttcttcatattctgctagacagaagaattctcagtaacttccttttgttgtgtgtattcaactcacggagttgaacgatcctttacacagagcagagttgaaacactctttttgtggaatttgcaagtggagatttcagccgctttgaggtcaatagtagaaaaggaaatatcttcgtagaaaaactagacagaatgattttcagaaactcctttgtgatgtgtgcgttcaactcacagagtttaacctttcttttcatagagcagttaggaaacactctgtttgtaaagtctgcaagtggatattcagatatccttgaggttttcgttggaaacgggatttcttcatattctgctagaaagaagaattcccagtaacttccttgtgttgtgtgtgttcaactcacagagttcaactttcatttacccagagcagatttgaaacactctttttgtggaatttgcaagtggagatttcaagcgctttgaggccaaaggcagaaaaggaaatatcttcgtttcaaaactagacagaatcattctcagaaactgctctgcgatgtgtgcgttcaactctcagagtttaactttgcttttcattcagcagtttggaaacactctgtttgtaaagtctgcacgtggataatttgaccacttagaggccttcgttggaaacgggtttttttcatgtaagcctagacagaagaattccccgtaacttccttgtgttgtgtacattcaactcacagagttgaacgttcccttagacagagcagatttgaaacactctttttgtgcaattggcaaatggagatttcaagcgctttaaggtcaatggcagaaaaggaaatatcttcgtttcaaaactagacagaatcattcccacaaactgcgttgtgatgggttcgttcaactcacagagtttaacctttccgttcatagagcagttaggaaacacactgtttgtaaagtctgtaagtggatattctgacatccttgtggccctcgttggaaacgggatttcttcatattctgctagacagaagaattctcagtaacttccttgtgttgtgtgtattcaactcacagagttgaacgatcctttacacacagcagacttgaaacactctttttgtggaatttgcaagtggagatttcagccgctttgaggtcaatggtagaataggaaatatcttcctatagaaactagacagaatgattctcagaaactcctttgtgatgtgtgcgctcaactcacagagtttaacctttcttttcatagagcagttaggaaacactctgtttgtaaagtctgcaagtggatattcagacctctttgaggccttcgtaggaaacgggatttcttcatattatgctagagagaagaatactcagtaacttccttgtgttgtgtgtattcaactgacagagttgaactttcatttagagagagcagatttgaaatactgtttttgtggaatttgcaagtggagatttcaaacgctttggggccaaaggcagaaaaggaaatatcttcgtataaaaactagacagaatcattctcagaaactgctctgcgatgtgtgcgttcaactctcagagtttaacttttcttttcattcagaagtttggaaacactctgtttgtaaagtctgcacgtggataacttgaccacttagaggccttcgttggaaacgggtttttttcatgtaaggctagacagaagaattcccagtaacttccttgtgttgtgtacattcaactcacagagttgaacgttcccttagagcagatttgaaacactctttttgtgcaattggcaaatggagatttcaagcgctttaaggtcaatggcagaaaaggaaatatcttcgtttcaaaactagacagaatcattcccacaaacagcgttgtgatgtgttcgttcaactcacagagtttaacctttcttttcatagagcagttaggaaacagtctgtttgaaaattctgtaagtggatattctgacatcttgtggccttcgttggaaacgggatttcttcatattctgctagacagaagaattctcagtaacttccgcgtgttgtgtgtattcaactcacagagttgaacgatcctttacacagagcagacttgaaacactctttttgtggaatttgcaagtggagatttcagccgctttgaggtcaatggtagaaaaggaaatatcttcgtataaaaactagacagaatgattctcagaaactcctttgtgatgtgtgcgttcaactcacagagtttaacctttcttttcatagagcagttaggaaacactctgtttgtaaagtctgcaagtggatattcagacatctttgaggctttcgttggaaacgggatttcttcatattctgctagaaagaagaattcccagtaacttccttgtgttgtgtgtgttcaactcacagagttgaactttcacttacacagagcagatttgaaacactctttttgtggaatttgcaagtggagatttcaagcgctttgaggccaaaggcagaaaaggaaatatcttcgtttcaaaactagacagagtcattctcagaaactgctgcgtgatgtgtgcgttcaactctcagagtttaacttttcttttcattcagcggtttggaaacactctgtttgtaaagtctgcatgtggaaattttgaccacttagaggccttcgttggaaacgggtttttttcatgtaaggctagacagaagtattcccagtaacttccttctgttgtgtgcattcaactcacagagttgaacgttcccttagacagagcagatttgaaacactctatttgtgcaatttgcaagtgtagatttcaagcgctttaaggtcaacggcagaaaaggaaatatcttcgtttcaaaactagacagaatcattcccacaaactgcgttgtgatgtgttcgttcaactcacagagtttaacctttcttttcatagagcagttaggaaacagtctgtttgaaaactctgtaagtggatattctgacatcttgtggccttcgttggaaacgggatttcttcatattctgctagacagaagaattctcagtaacttcccttgtgttgtgtgtattcaactcacagagttgaacgatcctttacacagagcagacttgaaacacactttttgtggaatttgcaagtggagatttcagccgttttgaggtcaatggtagaaaaggaaatatcttcgtataaagactagacagaaatgattctcagaaactcctttgtgatgtgtgcgttcaactcacagagtttaacctttcttttcatagagcagttaggaaacactctgcttgtaaagtctgcaagtggatattcagccctctttgaggccttcgttggaaatgggtttttttcatataaggctagacagaagaattctcagtaacttccttgtgttgtgtgtattcaactgacagagttgaactttcatttagacagagcagatttgagacactctttttgtggaatttgcaaaggtagatttcatgcgctttgaggccaaaggcagaaaaggaaatatcttcgtataaaaactagacagaatcattctcagaaactgctctgcgatgtgtgcgttcaactctcagagtttaacttttcttttcattcagcagtttggaaacactctgtttgtaaagtctgcacgtggataatttgaccacttagaggccttcgttggaaacgggttttttcctgtaaggctagacagaagaattcccagtaacttccttgtgttgtgtgcattccactcacagagttgaacgttcctttagacagagcagatttgaaacactctatttgtgcaatttgcaagtgtagatttcaagcgctttaaggtcaatggcagaaaaggaaatatcttcgtttcaaaactagacagaatcattcccaaaaactgcgttgtgatgtgttcgttcagctcacagagtttaacctttcttttcatagagcagttaggaaacagtctgtttgtaaattctgtaagtggatattctgacatcttgtggccttcgttggaaacgggatttcttcatattctgctagacagaagaattctcagtaacttccttgtgttgtgtgtattcaactcacagagttgaacgatcctttacacagagcagacttgaaacactctttttgtggaatttgcaagtggagatttcagccgctttgaggtcaatggtagaaaagtaaataacttcgtataaagactagacagaatgattctcagaaactcctttgtgatgtgtgcgctcaactcacagagtttaacctttcttttcatagagcagttaggaaacactctgtttgtaaagtctgcaagtggatattcagacctctttgaggccttcgtaggaaacgggatttcttcatattatgctagacagaagaattctcagtaacttccttgtgttgtgtgtattcaactgacagagttgaactttcatttagagagagcagatttgtaacactgtttttgtggaatttgcaagtggagatttcaagcgctttgcggccaaaggcagaaaaggaaatatcttcgtataaaaactagacagaatcattctcagaaaatcctctgtgatgtgtgcgttcaactctcagagtttaacttttcttttcattcagcagtttggaaacactctgtttgtaaagtctgcacgtggatattttgaccacttagaggccttctttggaaacgggtttttttcatgtaagtgtagacagaagaattcccagtaacttccttgtgttgtgtgcattcaactcacagagttgaacgttcccttagacagagcacatttgaaacactctatttgtgtaatttgcaagtgtagatttcaagcgctttaaggtcaacggcagaaaaggaaatatcttcgtttcaaaactagacagaatcattctcagaaactgctctgcgatgtgtgcgttcaactctcagagtttaacttttcttttcattcagcagtttggaaacactctgtttgtaaagtctgcaagtggatattcagacctctttgaggccttcgttggaaacgggatttcttcatactatgctagacagaagaattctcagtaacttccttgtgttgtgtgtattcaactcacagagttgaatgatcctttacacagagcagacatgaaacactctttttgtggaatttgcaagtggagatttcagccgctttgaggtcaatggtagaaaagggaatatcttcgtatagaaactagacagaatgattctcagaaactcctttgtgatgtgtgcgttcagctcacagagtttaacctttcttttcatagagcagttaggaaacactctgtttgtaaagtctgcaagtggatattcagacctctttgaggccttcgttggaaacgggatttcttcatattctgctagacagaacaattctcagtaacttccttgtgttgtgtgtgttcaactcacagagttgaactttcatttacacagagcagatttgaaacactctttttgtggaatttgcaagtggagatttcaagcgctttgaggccaaaggcagaaaaggaaatatcttcgtataaaaactagacagaatcattctcagaaactgctgcgtgatgtgtgcgttcaactctcagagtttaacttttcttttcattcagcggtttggaaacactctgtttgtaaagtctgcacgtggatattttgaccacttagaggccttcgttggaaacgggtttttttcatataaggctagacagaagaattctcagtaacttccttgtgttgtgtgtattcaactcacacagttgaacgatcctttacacagagtagacttgtaacactctttttgtggaatttgcaagtggagatttcagccgctttgaagtcaaatgtagaaaaggaaatatcttcctataaaaactagacagaacgattctcagtaaactcctttgtgatgtgtgcgttcaactcacagagtttaacctttcttttcatagagcagttaggaaacactctgtttgtaaagtctgcaagtggatattcagacctctttgaggccttcgttggaaacgggatttcttcatattctgctagacagaagaattctcagtaacttctttgtgttgtgtgtattcaactcacagagttgaacgatcctttacacagagcagacttgaaacactctttttgtggaatttgcaagtggagatttcagccgctttgaggtcaatagtagaaaaggaaatatcttcgtagaaaaactagacagaatgattctcagaaactcctttgtgatgtgtgcgttcaactcacagagttcaacctttcttttcatagagcagttgggaaacactctgtttgtaaagtctgcaagtggatattcagacttctttgaggccttcgttggaagcgggatttcttcatgttctgctagaaagaagaattcccagtaacttccttgtgttgtgtgtgttcaactcacagagttgaactttcatttacccagagcagatttgaaactctctttttgtggaatttgcaagtggagatttcaagcgctttgaggccaaaggcagaaaaggaaatatcttcgtttcaaaactagacagaatcattctcagaaactgctgcgtgatttgtgcgttcaactctcagagtttaacttttcttttcattcagcggtttggaaacactctgtttgtaaagtctgcacgtggatattttgaccacttagaggccttcgttggaaacgggtttttttcatgtaaggctagacagaagaattcccagtaacttccttgtgttgtgtgcattcaactcacagagttgaacgttcccttagacagagcagatttgaaacactctatttgttcaatttgcaagtgtagatttcaagcgctttaaggtcaacggcagaaaaggaaatatcttcgtttcaaaactagacagaatcattcccacaaactgcgttgtgatgtgttcgttcaactcacagagtttaacctttcttttcatagagcagttaggaaacagtctgtttgtcaattctgtaagtggatattctgacatcttgtggccttcgttggaaacggaatttcttcatattctgctagacagaagaattctcagtaacttccttgtgttgtgtgtattcaactcacagagttgaacgatcctttacacagagcagacttgaaatactctttttgtggaatttgcaagtggagatttcagccgctttgaggtcaatggtagaaaagggaatatcttcgtatagaaactagacagaatgattctcagaaactcctttgtgatgtgtgcgttcaactcacagagtttaacctttcttttcatagagcagttaggaaacactctgtttgtaaagtctgcacgtggatatttggacttctttgaggccttcgttggaaacgggtttttttcatgtaaggctagacagaagaattttcagtaacttccttgtgttgtgtgtattcaactgacagagttgaactttcatttaaagagagcagatttgtaacactgtttttgaggaatttgcaagtggagatttcaagcgatttgcggccaaaggcagaaaaggaaatgtcttcgtataaaaactagacagaatcattctcagaaactgctgcatgatgtgtgcgttcaactctcagagtttaacttttcttttcattcagcggtttggaaacactctgtttgtaaagtctgcacctggatattttgacgacttagacgccttcgttggaaacgggtttttttcatgtaaggctagacagaagaattcccagtaacttccttgtgttgtgtgcattcaactcaaagagttgaacgttccattagacagagcagatttgaaacactctatttgtgcaatttgcaagtgtagatttcaagcgctttaaggtcaatggcagaaaaggaaatatcttcgtttcaacacaagacagaatcattctcacaaactgcgttgtgatgtgttcgttcaactcacagagattaacctttctgttcatagagcagttaggaaacactctgtttgtaaagtctgtaagtggatattctgacatcttgtggccttcgttggaaacgggatttcttcatattctgctagacagaagaattctcagtaacttccttgtgttgtgtgtattcaactcacagagttgaacgatcctttacacagggcagacttgaaacactctttttgtggaatttgcaagtggagatttcagccgctttgaggtcaatggtagaaaagggaatatcttcgtttagaaactagactgaatgattctcagaaactcctttgtgatgtgtgcgttcaactcacagagtttaacctttcttttcatagagcagttaggaaatactctgtttgtaaagtctgcaagtggatattcagacatccttgaggctttcgttggaaacgggatttcttcatattctgctagaaagaataattctcagtaacttccttgtgttgtgtgtattcaactcacagtgttgaacgatcctttacagagagcagacttgaaacactctttttgtggaatttgcaagtggagatttcagccgctttgaggtcaatggtagaataggaaatatcttcctatagaaactagacagaatcattctcagaaactgctctgtgatgtgtgcgttcaactctcagagtttaacttttcttttcattcagcagtgtggaaaaactctgtttctaaagtctgcacgtggatattctgaccacttagaggccttcgttggaaacgggtttttttcctgtaaggctagacagaagaattcccagtaacttccttgtgttgtgtgcattcaactcacagagttgaacgttcccttagacagagcagatttgaaacactctatttgtgcaatttgcaagtgtagatttccagctctttatggtcaacggcagaaaaggaaatatcttcgtttcaaaactagacagaatgattctcagaaactcctttgtgatgtgtgcgttcaactcacagagtttaacctttcttttcatagagcagttaggaaacactctgtttgtaaagtctgcaagtggatattcagacatccttgaggctttcgttggaaacgggatttcttcatattctgctggaaagaagaattctcagaatcttccttgtgttgtgtgtattcaactcacagagttgaacgatgatttacacagagcagatttgaaacactctttttgtggaatttgcaagtggagatttcagccgctttgaggtcagtggtagaaaaggaaatatcttcatataaaaattagacagaatgattctcagaaactcctttgtgatgtgtgcgttcaactcacagagtttaacctttcttttcatagagcagttaggaaacactctgtttgtaaagtctgcaagtggatattctgacctccttgaggccttcgtgggaaacgggatttcttcatattctgctagacagaagaattctcagtaacttccttgtgttgtgtgtattcaactgacagagttgaactttcatttagagagagcagatttataacactgtttttgtggaatttgcaagtggagatttcaagcgctttggggccaaaggcagaacaggaaatatcttcgtataaaaactagacagaatcattctcagaaaatgctctgtgatgtgtgcattcaactctcagagtttaacgtttcttttcattcagcagtttggaaacactctgtttgtaaagtctgcacgtggatattttgaccacttagaggccttcgttggaaacgggtttttttcatgtaagggtagacagaagaattcccagtaacttgccttgtgttgtgtgcattcaactcacagagctgaacgttcccttagacagagcagatttgaaacactctatttgtgcaatttgcaagtgtagatttcaagcgctttaaggtcaatggcagaaaaggaaatatgcttcgtttcaaaactagacagaatgattctcagaaactcctttgtgatgtgtgcgttcaactcacagagtttaacctttctttttatagagcagttaggaaacactctctaaagtctgcaagtggatattcagacctccttgacgtcttcgttggaaacgggatttcttcatattctgctagacagaagaattctcagtaacttccttgtattgtgtgtattcaactcacagagttgaacgatcctttacacagagcagacttgaaacactctctttgtggaatttgcaagtggagatttcagccgctttgaggtcaatggtagaataggaaatatcttcctatagaaacaagacagaatgattctcagaaactcctttgtgatgtgtgcgttcaactcacagagtttaacctttcttttcatagagcagttaggaaacactctgtttgtaatgtctgcaggtggatattcagacatctttgaggctttcgttggaaacgggatttcttcatattctgctatacagaagaattctcattaacttccttgtgttgtgtgtattcaactgacagagttgaactttcatttagagagagcagatttgaaacactgtttttgtggaatttgcaagtggagatttcaagcgctttggggccaaaggcagaaaaggaaatatcttcgtataaaaactagacagaatcattctcagaaaactgctgcgtgatgtgtgcgttcaactctcagagtttaacttttcttttcattcagcggtttggaaacactctgtttgtaaagtctgcacgtggatattttgaccacttagaggccttcgttggaaacgggttttttttcatgtaaggctagacagaagaattcccagtaacttccttgtgttgtgtacattcaattcacagagttgaacgttcccttagacagagcagatttgaaacactctttttgtgcaattggcaagtggagatttcaagcgctttaaggtcaatggcagaaaaggaaatatcttcgtttcaaaactagacagaatcattcccacaaactgcgttgtgatgtgttcgttcaacccacagagtttaacctttctgttcatagagcagttaggaaacactctgtttgtaaagtctgaaagtggatattctgacatcttgtggccttcgttggaaacgggatttcttcatattctgctagacagaagaattctcagtaacttccttgtgttgtgtgtattcaactcacagagttgaacgatcctttacagagagcagacttgaaacactctttttgtggaatttgcaagtggagatttcagccgctttgaggtcaatagtagaataggaaatatcttcgtagaaaaactagacagaatgattctcagtaactcctttgtgatgtgtgcgttcaactcacagagtttaacctttcttttcatagagcagttaggaaacactctgtttgtagagtctgcaagtggatattcagacctccttgaggccttcgttggaaacgggatttcttcctattatgctagacagaagaattctcgggaacttccttgtgttgtgtgtattcaactgacagagttgaactttcatttagagagagcagatttgaaacactgtttttgtggaatttgcaagtggagatttcaaacgctttggggccaaaggcagaaaaggaaatatattcctataaaaactagacagaatcattctcagaaactgctgcgtgatgtgtgcgttcaactctcagagtttaacttttcttttcattcagcggtttggaaacactctgtttgtaaagtctgcccgtggatattttgaccacttagaggccttcgtgggaaacgggtttttttcacgtaaggctagacagaagaattcccagtaacttccttgtgttgtgtgcattcaactcacagagttgaacgttcccttagacagagcagatttgaaatactctatttgtgcaatttgcaagtgtagatttcaagcgctttaaggtcaacggcagaaaaggaaatatcttcgtttcaaaactagacagaatgattctcagaaacttcattgtgacgtgtgcgttcaactcacagagtttaacctttcttttcatagagcagttaggaaacactctgtttgtaaagtctgcatgtggatattcagacctctttgaggccttcgttggaaacgggatttcttcatactgtgctagacagaagaattctcagtaacttccttgtgttgtgtgtattcaactcacagagttgaacgatcctttacacagagcggacttgaaacacactttttgtggaatttgcaagtggagatttcagccgcgttgaggtcaatggtagaaaaggaaatatcttcgtataaaaactagacagaatgattctcagaaactcctttgtgatgtgtgcgttcaactcacagagtttaacctttcttttcatagagcagttaggaaacactctgtttgtaaagtctgcaagtggattctcagtcctctttgaggctttctttggaaacggcatttcttcatattatgctagacagaagaattcccagtaacttcattgtgttgtgtgtgttcaactcacagagttgaacttccatttacacagagcagatttgaaacactctttttgtggaatttgcaagtggagatttcaagcgatttgaggccaaaggcagaaaaggaaatatcttcgtttcaaaactagacagaatcattctcagaaactgctgcgtgatgtgtgcgttcaactctcagagtttaacttttcttttcattcagcggtttggaaacactctgtttgtaaagtctgcacgtggaaattttgaccacttagatgccttcgttggaaacgggtttttttcatgtaaggctagacagaagaattcccagtaacttccttgtgttgtgtgcattcaactcacagagttgaacgttcccttagacagagcagatttgaaaaactctatttgtgcaatttgcaagtgtagatttcaagcgctttaaggtcaacggcagaaaaggaaatatcttcgtttcaaaactagacagaatcattcccacaaactgcgttgtgaagtgttcgttcaactcacagagtttaacctttctgttcatagagcagttaggaaacactctgtttgtaaagtctgtaagtggatattctgacatcttgtggccttcgttggaaaagggatttcttcatattctgctagacagaagaattctcagtaacttccttgtgttgtgtgtattcaactcacagagttgaacgatcctttacacagagcagacttgaaacactctttttgtggaatttgcaagtggagatttcagccgctttggggtcaatggtagaaaaggaaatatcttcgtataaaaactagacagaatgattctcagaaactcctttgtgatgtgtgcgttcaactcacagagttcaacctttcttttcatagagcagttgggaaacactctgtttgtaatgtctgcaagtggatattcagacttctttgaggccttcgttggaagcgggatttcttcatgttctgctagacagaagaattctcagtaacttccttgtgttgtgtgtattcaactcacacagttgaacgatcctttacacagagcagacttgtaacactctttttgtggaatttgcaagtggagatttcagccgctttgaagtcaaaggtagaaaaggaaataacttcctataaaaactagacagaatgattctcagaaactcctttgtgatgtgggtgttcaactcacagagtttaacctttcttttcgtagagcagttaggaaacactgtgattgtaaagtctgcaagtggatattccgacctctttgaggccttcgttggaaacgggtttttttcatataagactagacagaagaattctcagtaacttccttgtgttgtgtgtattcaactgacagagttgaactttcatttagagagaacagatttgaaacactgtttttgtggaatttgcaagtggagatttcaagcgctttggggccaaaggcagaaaagggaatatcttcgtagaaaaacaagacagaatcattctcagaaactgctctgcgatgtgtgcgttcaactctcagagtttaacttttcttttcattcagcagtttggaaacactctgtttgtaaagtctgcacgtggatattttgaccacttagaggccttcgttggaaacgagtttttttcctgtaaggctagacagaagaattccccgtaacttccttgtgttgtgtgcattcaactcacagagttgaacgttcccttagacagagcagatttgaaacactctatttgtgcaatttgcaagtgtagatttcaagcgctttaaggtcaatggcagaaaaggaaatatcttcgtttcaaaactagacagaatcattcccacaaactgcgttgtgatgtgttcgttcaactcacagagtttaacctttccgttcatagagcagttaggaaacactctgtttgtaaagtctgtaagtggatattctgacatcttgtggccatcgttggaaacgggatttcttcatattctgctagacagaagaattctcagtaacttccttgtgttgtgtgcatttaactcacagagttgaacgatcctttacacagagcagacttgaaacactctttttgtggaatttgcaagtggagatttcagccgctttgaggtcaatggtagaaaaggaaatatcttcgtataaagactagacagaatcattctcagaaagtcctttgtgatgtgtgtgttcaactcacagagtttaacctttcttttcatagagcagttagtaaacactctgtttataaagtctgcaagtggatattcagacccctttgaggccttcgttggaaacgggatttcttcatattatgctagacagaagaattcccagtaacttccttgtgttgtgtgtgttcaactcacagagttgaacttccatttacacagagcagatttgaaacactctttttgtggaatttgcaagtggagatttcaagcgatttgaggccaaaggcagaaaaggaaatatcttcgtttcaaaactagacagaatcattctcagaaactgatgcgtgatgtgtgcgttcaactctcagagtttaacttttcttttcattcaggggtttggaaacactctgtctgtaaagtctgcacgtggatattttgaccacttagaggccttcgttggaaaagggtttttttcatgtaaggctagacagaagaattcccagtaacttccttgtgttgtgtgcattcaactcacagagttgaacgttcccttagacagagcacatttgaaacactctatttgtgcaatttgcaattgtagatttcaagcgctttaaggtcaatggcagaaaaggaaatatcttcgttttaaaactagacagaatcattcccacaaactgcgttgtgatgtgttcgttcaactcacagagttttacctttctgttcatagagcagttaggaaacactctgtttgtaaagtctgtaagtggatattctgacatcttgtggccttcgttggaaatgggatttcttcatattctgctagacagaagaattctcagtaacttccttgtgttgtgtgtattcaactcacagagttgaacgatcctttacacagagcagacttgaaacactctttttgtggaatttgcaagtgtagatttcagccgctttgaggtcaatagtagaaaaggaaatatcttcgtagaaaaactagacagaatgattctcagaaactcctttgtgatgtgtgcgttcaactcacagagtttaacctttcttttcatagagcagttaggaaacactctgtttgtaaagtctgcaagtggatattcagacctctttgaggccttcgttggaaacgggtttttttcttgtaaggctagacagaagaattcccagtaacttccttgtgttgtatacattcaactcacagagttgaacgttcccttagacagagcagatttgaaacactctttttgtgcaattggcaagtggtgatttcagccgctttgaggtcaatggtagaaaagggaatatcttcgtataaaaactagacagaatcattctcagaaactgctctgcgatgtgtgcgttcaactctcacagtttaacttttcttttcattcagcagtttggaaacactctgtttgtaaagtctgcacgtggataatttgaccacttagaggccttcgttggaaacgggttattttcatgtaagtctagacagaagaattcccagtaacttccttgtgttgtgtgcattcaactcacagagctgaacgttcccttagacagaacagatttgaaacactctatttgtgcaatttgcaagtgtagatttcaagcgctttaaggtcaacggcagaaaaggaaatatcttcgtttcaaaactagacagaatcattcccacaaactgcgttgtgatgtgttcgttcaactcacagagtttaacctttctgttcatagagcagttaggaaacactctgtttgtaaagtctgcaagtggatattctgacatcttgtggccttcgttggaaacgggatttcttcctattctgctagacagaagaattctcagtaacttccttgtgttgtgagtattcaactcacagatttgaacgatcctttacacagagcagacttgaaacactctttttgtggaatttgcaagtggagatttcagcctctttgaggtcaatggtagaataggaaatatcttcctatagaaactagacagaatgattctcagaaactcctttgtgatgtgtgcgttcaactcagagagtttaacctttcttttcatagagcagttaggaaacactccgtttgtaaagactgcaagtggatattcagacctctttgaggccttctttggaaacgggatttcttcatattatgctagacagaagaattctcagtaacttccttgtgttgtgtgtattcaactgacagagttgaactttcatttagagagagcagatttgaaacactgtttttgtggaatttgcaagtggagatttcaagcgctttggggccaaaggcagaaaaggaaatatcttcgtagaaaaactagacagaatcattctcagaaactgctctgcgatgtgtgcgttcaactctcagagtttaacttttcttttcattcagaagtttggaaacactctgtttgtaaagtctgcacgtggataacttgaccacttagaggccttcgttggaaacgggtttttttcatgtaaggctagacagaagtattcccagtaacttccttgtgttgtgtacattcaactcacagagttgaacgttcccttagacagagcagatttgaaacacactttttgtgcaattggcaagtggagatttcaagcgctttaaggtcaatggcagaaaaggaaatatcttcgtttcaaaactagacagaatcattcccacaaactgcgttgtgatgtgttcgttcaactcacagagtttaacctttcttttcatagagcagttaggaaacagtctgtttgtaaattctgtaagtggatattctgacatcatgtggccttcattggaaacgggatttcttcatattctgctagacagaagaattcccagtaacttccttgtgttgtgtgtattcaactcacagagttgaccgatcctttacacagagcagacttgtaacactctttttgtggaatttgcaagtggagatttcagccgctttgaagtcaaaggtagaaaagggaatatcttcctataaaaactagacagaatgattctcagaaactcctttgtgatgtgtgtgttcaactcacagagtttaacctttcttttcatagagcagctagtaaacactctgtttataaagtctgcaagtggatattcagacccctttgaggccttctttggaaacgggatttcttcatattctgctagacagaagaattctcagtaacttccttgtgttgtgtgtattcaactgacagagttgaactatcatttagagagagcagatttgaaacactgtttttgtggaattggcaagtggagatttcaagcgctttggggccaaaggcagaaaaggaaatatcttcgtataaaaactagacagaatcattctcagaaactgctctgcgatgtgtgcgttcaactctcagagtttaacttttcttttcattcagcagtttggaaacactctggttgtaaagtctgcacgtggataacttgaccacttagaggccttcgttggaaacgggtttttttacctgtaaggctagacagaagaattcccagtaacttccttgtgttgtgtacattcaactcacagagttgaacgttcccttagacagagcagatttgaaacactctttttttgcaattggcaaatggagatttcaagcgctttaaggtcaatggcagaaaaggaaatatcttcgtttcaaaactagacagaatgattctcagaaactcttttgtgatgtgtgcgttcaactcacacagtttaacctttcttttcatagagcagttaggaaacactgtttgtaaagtctgcaagtggatattcagacctccttgaggccttcgttggaaacgggatttcttcatattatgctagacagaagaattctcagtaacttccttgtgttgtgtgtattcaactcacagagttgaacgatcctttacacagagcagacttgaaacactctttttgtggaatttgcatatggagacttcagccgctttgaggtcaatggtagaataggaaatatcttcctatagaaactagacagaatgattctcagaaacttctttgtgatgtgtgcgttcaactcacagagtttaacctttcttttcatagagcagttaggaaacactctgtttgtaaactctgcaagtggatgttcagacctctttgaggccttggttggaaacgggatttcttcatactatgctagacagaagaattctcagtaacttccttgtgttgtttgtattcaactgacagagttgaactttcatttagagagagcagatttgaaacactgtttttgtggaatttgcaagtggagatttcaagcgctttggggccaaaggcagaaaaggaaatatcttcgtataaaaactagacagaatcattctcagaaactgctgcgtgatgtgtgcgttcaactctcagagtttaacttttcttttcattcagcggtttggaaacactctgtaaagtctgcacgtggatattttgaccacttagatgccttcgttggaaacgggtttttttcatgtaaggctagacagaagaattcccagtaacttccttgtgttgtgtgcattcaactcacagagttgaacgttcccttagacagagcagatttgaaacactctatttgtgcaatttgcaagtgtagatttcaagcgctttaaggtcaatggcagaaaaggaaatatcttcgtttcaaaactacagagaatcattcccccaaactgcgttgtgatgtgttcgttcaactcacagagtttaacctttcttttcatagagcagttaggaaacagtctgtttgtcaattctgtaagtggatattctgacatcttgtggccttcgttggaaacgggatttcttcatattctgctagacagaagaattctcagtaacttccttgtgttgtgtgtattcaactcacagggttgaacgatcctttacacagagcagacttgtaacactctttttgtggaatttgcaagtggagatttcagccgctttgaagtcaaaggtagaaaaggaaatatcttcctataaaaactagacagaatgattctcagaaacttctttgtgatgtgtgcgttcaactcacagagtttaacctttcttttcatagagcagttaggaaacactctgtttgtaaactctgcaagtggatattgagacctctttgaggccttcgttggaaacgggatttcttcatactgtgctagacagaagaattctcagtaacttccttgtgttgtgtgtattcagctgacagagttgaactatcatttagagagagcagatttgaaacactgtttttgtggaattggcaagtggagatttcaagcgctttggggccaaaggcagaaaaggaaatatcttcgtataaaaactagacagaatgattctcagaaactgctctgcgatgtgtgcgttcaactctcagagtttaacttttcttttcattcagcagtttggaaacactctgtttgtaaagtctgcacgtggataatttgaccacttagaggccttcgttggaaacgggtttttttcatgtaaggctagacagaagaattctcagtaacttccttgtgttgtgtgtattcaactcacagagttgaacgatcctttacacaaagcagacttgtaacactctttttctggaatttgcaagtggagatttcagccgctttgaagtcaaaggtagaaaaggaaatatcttcctataaaaactagacagaaatcattcccacaaactgcgttgtgatgtgttcgttcaactcacagtagtttaacctttctgttcatagagcagttaggaaacactctgtttgtaaagtctgtaagtggatattctgacatcttgtggccttcgttggaaacgggatttcttcatattctgctagacagaagaattctcagtaactttccttgtgttgtgtgtattcaactcacagagttgaacgatcctttacacagagcagacttgaaacattctttttgtggaatttgcaagtggagattttagccgctttgaggtcaatggtagaataggaaatatgttcctatagaaactagacagaatgattctcataaactcctttgtgatgtgtgcgttcaactcacagaatttaacctttcttttcatagcgcagttaggaaacactctgtttgtaaagtctgcaagtggatattcagacatcttttaggccttcgttggaaacgggatttcttcatattatgctagacagaagaattctcagtaacttccttgtgttgtgtttattcaactcacagatttgaatgatcctttacacagagcagacttgaaacaccctttttgtggaatttgcaagtggagatttcagccgatttgaagtcaatggtagaaaagtaaatatcttcgtataaagactagacagaatcattctcagaaactgctgcgtgatgtgtgcgatcaactctcagagtttaacttttcttttcattcagcggtttggaaacactctgtttgtaaagtctgcacgtggaaattttgaccacttagagaccttcgttggaaacgggattttttcatgtaaggctagacagaagaattcccagtaacttccttgtgttgtgtacattcaactcacagagttgaacgttcccttaaacagagcagatttgaaacactctttttgtgcaattggcaagtggagatttcaagcgctttgaggtcaatggcagaaaaggaaatatcttcgtttcaaaactagacagaatgattctcagaaaactcctttgtgatgtgtgcgttcaactcacagaatttaacttttcttttcatagagcagttaggaaacactctgtatgtaaagtctgcaagtggatattcagacctcttttgaggccttcgttggaaacgggatttcttcatattctgctagacagaataattctcagtaacttctttgtgttgtgtgtattcaactcacagagttgaaggatcctttacagagagcaggcttgaaacactctttttgtcgaatttgcaagtggagatttcagccgctttgaggtcaatggtagaataggaaatatcttcttatagaaactagacagaatgattctcagaaacttctttgtgatgtgtgtgttcaactcacagagtttaacctttcttttcatagagcagttaggaaacactctgcttgtaaagtctgcaagtggatattcagacctcgttgaggccttcgttggaaacgggatttcttcatattctgctagacagaagaattctcagtaacttccttgtgttgtgtgtattcaactgacagagttgaactttcatttagagagagcagatttgaaacactgtttttgtggaatttgcaagtggagatttcaagcgctttggggccaaaggcagaaaaggaaatatcttcgtataacaactagacagaatcattctcagaaactgctgcgtgatgtgtgcgttcaactctcagcagtttaacttttcttttcattcagcggtttggaaacactctgtttgtaaagtctgcacgtggatattttgaccacttagagaccttcgttggaaacgggtttttttcatgtaaggctagacagaagaattcccagtaacttccttgtgttgtgtgcattcaactcacagagttgaacgttcccttagacagagcagatttgaaacactctatttgtgcaatttgcaagtgtagttttcaagctctttgaggtcaacggcagaaaaggaaatatcttcgtttcaaaactagacagaatcattcccacaaactgcgttgtgatgtgttcgttcaactcacagagtttaacctttctgttcatagagcagttaggaaacactctgtttgtaaagtctgtaagtggatattctgacatcttgtggccttcgttggaaacgggatttcttcatattctgctagacagaagaattctcagtaacttccttgtgttgtgtgtattcaactcacagagttgaacgttcctttacacagagcggacttgaaacactctttttgtggaatttgcaagtggagatttcagccgctttgaggtcaatggtagaaaaggaaatatcttcctataaaaactagacagaatgattctcagaaactcctttgtgatgtgtgcgttcaacacacagagttaaacttttcttttcatagagcagttaggaaacactctgtttgtaaagtctgcaagtggatattcagacctctttgaggccttcgttggaaacgagatttcttcatattatgctagacagaagaattctcagtaactttcttgtgttgtgtgtattcaactgtgagagttgaactttcatttagagagaccagatttgaaacactgtttttgtggaatttgcaagtggagatttcaagcgctttggggccaaaggcagaaaaggaaatatcttcgtataaaaactagacagaatcattctcagaaactgctctgcgatgtgtgcgttcaactctcagagtttaaatttgcttttcattcagcagttcggaaacactctgtttgtaaagtctgcacgtggataatttgaccacttagaggccttcgttggaaacgggtttttttcatgtaaggctagacagaagaattcccagtaacttccttgtgttgtgtgcattcaactcacagagttgaacgttcccttagagcagatttgaaacactctatttgtgcaatttgcaagtgtagatttcgagcgctttaaggtcaatggcagaaaaggaaatatcttcgtttcaaaactagacagaatcattcccacaaactgcgttgtgatgtgttcgttcaactcacggagtttaacctttctgttcatagagcagttaggaaacactctgtttgtaaagtctgcaagtggatattcagacctccttgaggccttcgttggaaacgggatttcttcatattctgctagacagaataattctcagtaacttccttgtgttgtgtgtattcaactcacagacttgaacaatcctttacacagagccgacttgaaacactctttttgtggaatttgcaagtggagatttcagccgctttgaggtcaatggtagaaaaggaaacatctccgtataaagactagacagaatgattctcagaaaatcctttgtgatgtgtgcgttcaactcacagagtttaacttttcttttcatagagcagttaggaaacactctgtttgtaaagtctgcaagtggatattcagatctctttgaggccttcgttggaaacgggatttcttcatattctgctagacagaagaattcccagtaacttccttgtgttgtgtgtgttcaactcacagagatgaactctcatttacacagagcagagttgaaacactctttttgtggaatttgcaagtggagatttcaagcgctttgaggccaaaggcagaaaaggaaatatcttcgtataaaaactagacagaatcattctcagaaactgctctgtgatgtgtgcgttcaactctcagagtttaacttttcttttcattcagcagtttggaaacactctgtttgtaaagtctgcacgtggatattttgaccacttagaggccttcgttggaaacgggtttttttcatgtaagggtagacagaagaattcccagtaacttccttgtgttgtgtgcattcaactcacagagttgaacgttcccttagacagagcagatttgaaacactctatttgtgcaatttacaagtgtagatttcaagcgctttaaggtcaacggcagaaaaggaaatatcttcgtttcaaaactagacagaatcattcccacaaactgcgttgtgatgtgttcgttcaactcacagagtttaacctttctgttcatagagcagttaggaaacactctgtttgtaaagtctgcaagtggatattcagacctcctagaggccttcgttggaaacgggatttcttcatattctgctagacagaagaattctcagtaacttcattgtgttgtgtgtattcaactcacagatttcaacgatcctttacacagagcagacttgaaacactctttttgtggaatttgcaattggagatttcagccgctttgaggtcaatggtagaataggaaatatcttcctatagaaactagacagaatgattctcataaactcctttgtgatgtgtgcgttgaactcacagagtttaacctttcttttcatacagcagttaggaaacactctgtctataaagtctgcaagtggatattcagacccctttgaggccttcgttggaaacgggatttcttcatattatgctagacagaagaattctcactaacttccttgtgttgtgtgtattcaactgacagagttgaactttcatttagagagagcagatttgaaacactgtttttgtggaatttgcaagtggagacttcaagcgctttggggccaaaggcagaaaaggaaatatcttcgtataaaaactagacagaatcattctcagaaactgctctgcgatgtgtgcgttcaactctcagagtttaacttttcttttcattcagcagtttggaaacactctgtttgtaaagtctgcacgtgcataatttgaccacttagaggccttcgttggaaacgggtttttttcatgtaaggctagacagaagaattctcagtaactaccttgtgttgtgtgtattcaactcacagagttgaacgatcctttacacagagcagacttgtaacactctttttgtggaatttgcaagtggagatttcagccgctttgaagtcaaaggtagaaaaggaaatatcttcctataaaaactagacagaatcattcccacaaactgctttgtgatgtgttcgttcaactcacagagtttaacctttcttttcatagagcagttaggaaacagctctgtttgtaaattctgtaagtggatattctgacatcttgtggccttcgttggaaacgggatttcttcatattctgctagacagaagaattctcagtaacttccttgtgttgtgtgtattcaactcacagagttgaacgatcctttacacagagcagacttgaaacactctttttgtggaatttgctagtggagatttcagccgctttgaggtcaatagtagaaaaggaaatatcttcgtagaaaaactagacagaatgattctcagaaacttcattgtgatgtgtgcgatcaactcacagagtttaacctttcttttcatagagcagttaggaaacactctgtttgtaaactctgcaagtggatattcagtcctctttgaggccttcgttggaaacgggatttcttcatactgtgctagacagagaattcccagtaacttccttgtgttgtgtgtgttcaactcacagagttgaactttcatttacacagagcagatttgaaacactctttttgtggaatttgcaagtggagatttcaagcgctttgaggccaaaggcagaaaaggaaatatcttcgtataaaaactagacagaatcattctcagaagctgctctgcgatgtgtgcgttcaactctcagagtttaacttttcttttcattcagcagtttggaaacactctgtttgtaaagtctgcacgtggatattttgaccacttagaggccttcgttggaaacgggtttttttcctgtaaggctagacagaagaattcccagtaacttccttgtgttgtgtacattcaactcacagagttgaacgttcccttagacagagcagatttgaaacactctttttgtgcaattggcaagtggagatttcaagcgctttgaggtcaatggcagaaaaggaaatatcttcgtttcaaaactagacagaatcattcccacaaactgcgttgtgatgtgttcgttcaactcacagagtttaaccttgcttttcatagagcagttaggaaacagtctgtttgtaaattctgtaagtggatattctgacatcttgtggccttccttggaaacgggatttcttcatattctgctagacagaagaattgtcagtaacttccttgtgttgtgtgtattcaactcacagagttgaacgatcctttacagagagcagacttgaaacactctttttgtggaatttgcaagtggagatttcagccgctttgaggtcaatagtagaaaaggaaatatcttcgtagaaaaactagacagaatgattctcagaaactcctttgtgatgtgtgcgttcaactcacagagtttaacctttcttttcatagagcagttaggaaacactccgtttgtaaagtctgcaagtggatattcagacctctttgaggccttcgttggaaacgggttttttccatataaggctagacagaagaattctcagtaacttccttgtgttgtgtgtattcaactgacagagttgaacgttcatttagagagagcagatttgaaacactgtttttgtggaatttgcaattggagatttcaagcgctttggggccaaaggcagaaaaggaaatatcttcgtataaaaactagacagaatcattctcagaaactgctctgtgatgtgtgcgttcaactctcagagtttaacttttcttttcattcagcactttggaaacactctgtttgtaaagtctgcacgtggatattttgaccacttagaggccttcgttggaaacgggtttttttcctgtaaggctagacagaagaattcccagtaacttccttgtgttgtgtgcattcaactcacagagatgaacgttcccttagacagagcagatttgaaacactctatttgtgcaatttgcaagtgtagatttcaagcgctttaaggtcaacggcagaaaaggaaatatcttcgtttcaaaactagacagaatgattctcagaaactcctttgtgatgtgtgcgttcaactcacagactttaacctttcttttcatagagcagttaggaaacactctgtttgtaaagtctgcaagtggatattcagacatccttgaggctttcgttggaaacgggatttcttcatattctgctagaaagatgaattctcagtaacttccttgtgttgtgtgtattcaactcacagagttgaacgatcctttacacagagcagatttgaaacactgtttttctggaatttgcaagtggagatttcagccgctttgaggtcaatggtagaaaaggaaatatctacgtataaaaactagacagaatgattctcagaaactcctttgtgatgtgtgcgttcaactcacagagttcaaactttcttttcatagagcagttgggaaacactctgtttgtaaagtctgcaagtggatattcagacttctttgaggccttcgttggaagcgggatttcttcatattatgctagacagaagaattcccagtaacttccttgtgttgtgtgtgttcaactcacagagttgaactttcatttacacagagcagatttgaaacactctttttgaggaatttgcaaatggagatttcaagcgctttgaggccaaaggcagaaaatgaaatatcgtcgtataaaaactagacagaatcattctcagaaactgctctgcgatgtgtgcgttcaactctcagagtttaacttttcttttcattcagcagtttggaaacactctgtttgtaaagtgtgcacgtggatattttgaccacttagaggccttcgttggaaacgggtttttttcctgtaaggctagacagaagaattcccagtaacttccttgtgttgtgtacattcaactcacagagttgaacgttcccttagacagagcagatttgaaacactctttttgtgcaattggcaagtggagatttcaagcgctttaaggtcaatggcagaaaaggaaatatcttcgtttcaaaactaggcagaatcattcccacaaactgcgttgtgatgtgttcgttcaactcacagagtttaacctttctgttcatagagcagttaggaaacactctgtaaagtctgtaagtggatattctgacatcttgtggccttcgttggaaacgggatttcttcatattctgctagacagaagaattctcagtaacttccttgtgttgtgtgtattcaactcacagagttgaactatcctttacacagagcagacttgtaacactctttttgtggaatttgcaagtggagatttcagccgctttgaagtcaaaggtagaaaaggaaatatcttcctataaaaactagacagaatgattctcagaaactcctttgtgatgtgtgcgttcaactcacagagtttaacttttcttttcatagagcagttgggaaacactctgtttgtaaagtctgcaagtggatattcagacctctttgaggccttcgttggaaacgggattttttcatattatgctagacagaagaattccgagtaacttccttgtgttgtgtgtgttcaactcacagagttgaactttcatttacacagagcagatttgaaacactctttttgtggaatttgcaagtggagatttcaagcgctttgaggccaaaggcagaaaaggaaatatactccgtttcaaaactagacagaatcattctcagaaaccgctctgtgatgtgtgcattcaactctcagagtttaacttttcttttcattcagcagtttggaaacactctgtttgtaaagtctgcacgtggatattttgaccacttagacgccttcttttgaaacgggttttttttcatgtaaggctagacagaagcaattcccagtaacttccttgtgttgtgtacattcaactcacagagttgaacgttaccttagacagagcagatttgaaacactctttttgtgcaattggcaaatggagatttcaagcgctttaaggtcaatggcagaaaaggaaatatcttcgtttcaaaactagacagaatcattcccacaaactgcgttgtgatgtgttcgttcaactcacagagtttaacctttcttttcatagagcagttaggaaacagtctgtttgtcaattctgtaagtggatattctgacatcttgtggccttctttggaaacgggatttcttcatattctgctagacagaagaattctcagtaacttccttgtgttgtgtgtattcaactcacagcaatttaacgatcctttacacagagcagacttgaaacactctttttgtggaatttgcaagtggagatttcagccgctttgtggtcaatgatagaaaaggaaatatcttcgtataaaaactagacagaatgattctcagaaactcctttgtgatgtgtgcgttcaactcacagagtttaacctttcttttcatagagcagttaggaaacactctgtttgtaaagtctgcaagtagatattcagacatctttgaggctttcgttggaaacgggatttcttcatattctgctagacagaagaattcccagtaacttccttgtgttgtgtgtgttcaacttcacagagttgaactttcatttacacagagcagatttgaaacactctttttgtggaatttgcaagtggagatttcaagcgctttgaggccaaaggcagaaaaggaaatatcttcgtttcaaaactagacagaatcattctcagaaactgctgcgtgatgtgtgcgttcaactctcagagtttaacttttcttttcattcagcggtttggaaacactgtgtttgtaaagtctgcacgtggatattttgaccacttacaggccttcgttggaaacgggtttttttcatgtaaggctagacagaagaattcccagtaacttccttgtgttgtgtacattcaactcacagagttgaacgttcccttagacagagcagatttgaaacactctttttgtgcaattggcaaatggagatttcaagcgctttaagttcaatggcagaaaaggaaatatcttcgtttcaaaactagacagaatgattctcagaaactcctttgtgatgtgtgcgttcaactcacagagtttaacctttcttttcatagagcagttaggaaacactctgtttgtgaagtctgcaagtggatattcagacctccttgaggccttcgttggaaacgggatttcttcatattctgctagacagaagaattctcagtaacttccttgtgttgtgtgtattcaactcacagagttgaacgatcctttacacagagcagacttgaaacactctttttgtggaatttgcaagtggagatttcagccgctgtgagttcaatggtagaataggaaatatcttcctatagaaagtagacagaatgattctcagaaactcctttgtgatgtgtgcgttcaactcacagagtttaacctttcttttcatagagcagttaggaaacactctgtttgtaaagtctgcaagtggatattctgacctccttgaggcgttcgttggaaaagggatttcttcatattctgctagacagaatcatactcagaaactgctctgcgatgtgtgcgttcaactctcagagtttaacttttcttttcattcagcagtttggaaacactctgtttgtgaagtctgcacgtggatattttgaccacttagtggccttcgttggaaacggttttttttcctgtaaggctagacagaagaattcccagtaacttccttgtgttgtgtacattcaactcacagagttgaacgttcccttagacagagcagatttgaaacactctttttgtgcaattggcaagtggtgatttcagccgctttgaggtcaatgatagaaaaggaaatatcttcgtataataactagacagaatgattctcagaaacttcattgtgatgtgtgcgttcaactcacagagtttaacctttcttttcatagagcagttaggaaacactctgtctgtaaagtctgcaagtggatattcagacctctttgaggccttcgttggaaacgggtttttttcatataaggctagacagaagaattctcagtaacttccttgttttgtgtgaattcacctcacagatttgaacgatcctttacacagagcagacttgaaacactctttttgtggaatttggaagtggagatttcagccgctttgtggtcaatagtagaataggaaatatcttcctatagaaactagacagaatgattctcagaaactcctttgtgatgtgtgcgttcaactcacagagtttaacctttcttttcatagagcagttaggaaacactctgtttttaaagtctgcaagtgtatattcagacatccttgaggctttcgttgcaaacgggatttcttcatattctgctagaaagaagaattctcagaaacttccctgtgttgtgtgaattcaactcacagagttgaacgatcctttacacagagcagacttgaaacactctttttgtggaatttgcaagtagagatttcagccgctttgaggtcaatggtagaatagggaatatcttcctatagaaactagacagaatgattctcagaatctcctttgtgatgtgtgcgttcaactcacagagtttaacctttcttttcatagagcagttgggaaacactctgtttgtaaagtctgcaagtggatattcagacatccttgaggctttcgttggaaacgggatttcttcatattctgctagaaagaagaattttcagaaacttccttgtgttgtgtgtattcaactcacagagttgaacgatcatttacacagagcagacttgagacactctttttgtggaatttgtaagtggagatttcagccgctttgaggtcaatggtagaaaaggaaatatcttcgtataaaaactagacagaatgattctcagaaactcctttgtgatgtgtgcgttcaactcacagagtttaacctttcttttcatagagcagttaggaaacactctgtttgcaaagtctgcaagtggatattcagacctctttgaggccttcgttggaaacggttttttttcatataaggctagacagaagaattctcagtaacttccttgtgttgtgtgtattcaactgacagatttgaactttcatttagagagagcagatttgaaacactgtttttgtggaatttgcaagtggagatttcaagcgctttggggccaaaggcagaaaaggaaatatcttcgtataaaaactagacagaatcattctcagaaactgctctgcgatgtgtgcgttcaactctcagagtttaacttttcttttcattcagcagtttggaaacactctgtttgcaaagtctgcacgtggatattttgaccacttagaggccttcgttggaaacgggtttttttcatgtaaggctagacagaagaattcccagtaacttccttgtgttgtgtacattcaactcacagagttgaacgttcccttagacaggagcagatttgaaacactctttttgtgcaattggcaagtggtgatttcagccgctttgaggtcaatggtagaaaaggaaatatcttcgtataaaaactagacagaatgattctgagaaactcctttgtgatgtgtgcgttcaactcacagagttcaacctttcttttcatagagcagttgggaaacactctgtttgtaaattctgcaaatgcatattcagacttctttgaggccttcgttggaagcgggatttcttcatattctgctagacagaagaattctcagaaacttcgatgtgttgtgtgttttcaaatcacagagttcaacgatcctttacacagagtagacttgaaacactctttttgtggaattggcagggtggagatttcagccgctttgaggtcaatggtagaaaaggaaatatcttcgtataaaaactagacagaatgattctcagaaacttctttgtgatgtgtgcgttcaactcacagagtttaacctttcttttcatagagcagttaggaaacactctgtttgtaaagtctgcaagtggatattcagacctctttgaggccttcgttggaaacgggtttttttcatataaggctagacagaagaattcccagtaacttccttgtgttgtgtgtgttcaactcacagcagttgaactttcatttacacagagcagatttgaaacactctttttgtggaatttgcaagtggagatttcaagcgctttgaggccaaaggcagaaaaggaaatatcttcgtataaaaactagacagaatcattctcagaaactgctctgcgatgtgtgcgttcaactctcagagtttaagttttcttttcattcagcagtttggaaacactctgtttgtaaagtctgcacgtggatattttgaccacttagaggccttcgttggaaacgggtttctttcctgtaaggctagacagaagaattcccagtaacttccttgtgttgtgtgcattcaactcacagagttgaacgttcccttagacagagcagatttgaaacagcctatttgtgcaatttgcaagtgtagatttcaagcgctttaaggtcaacggctgaaaaggaaatatcttcgtttcaaaactagacagaaatcattcccacaaactgcgttgtgatgtgttcgttcaactcacagagtttaacctttctgttcatagagcagttaggaaacactctgtttgtaaagtctgcaagtggatattcagacctccttgaggccttcgttggaaacgggatttcttcatattctgctagacagaataattctcagtaacttccttgtgttgtgtgtattcaactcacagagttgaaggatcctttacagagagctggcttgcaacactctttttgtcgaatttgcaagtggagatttcagccgctttgaggtcaatggtagaataggaaatatcttcttatagaaactagacagaatgattctcagaaactcctttgtgatgtgtgtgttcaactcacagagtttaacctttcttttcctagagcagttagtaaacactctgtttataaagtctgcaagtggatattcagacccctttgaggccttcgttggaaacgggatttcttcatattattctagacagaagaattctcagtaacttccttgtgttgtgtgtattcaactcacagagttgaactttcatttagagagagcagatttgaaacactgtttttgtggaatttgcaagtggtgacttcaagcgctttggggccaaacgcagaaaaggaaatatcttcgtataaaaactagacagaaatcattctcataaactgctgcgtgatgtgtgcgttcaactctcagagtttaacttttcttttcattcagcggtttggaaacactctgtttgtaaagtttgcacgtggatattttgaccacttagaggccttcgttggaaacgggtttttttcatgtaaggctagacagaagaattcccaggaacttccttgtgttgtgtacattcaactcacagagttgaacgttcccttagacagagcagatttgaaacactctttttgtgcaattggcaaatggagatttcaagcgctttaaggtcaatggcagaaaaggaaatatcttcgtttcaaaactatacagaatcattcccacaaactgcgttgtgatgtgtgcgttcaactcaaagagtttaacctttcttttcatagagcagttaggaaacactctgtttgtaaagtctgcaagtggatattcagacctccttgaagccttcgttggaaacgggatttcttcatattctgctagacagaagaattctcagaaacttccttctgttgtgtgtattcaactcacagagttgaacgatcgtttacacagagcagacttgagacactctttttgtggaatttgtaagtggagatttcagccgctttgaggtcaatggtagaaaaggaaatatcttcatataaaaactagacagaatgattctcagaaactcctttgtgatgtgtgcgttcaactcacagagttcaacctttcttttcatagagcagttgggaaacactctgtttgtaaagtctgcaagtggatattcagacttctttgaggccttcgttggaagcgggatttcttcatgttcagctagacagaagaattctcagaaacttccttgtgttgtgtgtattcaactcacagagttgaacgatcctttacacagagcagacttgaaacactccttttgtggaatttgcaagtggagatttcagccgctttgaggtcaatggtagaataggaaatatcttcctatagaaactagacagaatcattctcagaaactgctctgcgatgtgtgcgttcaactctcagtgtttaacttttcttttcattcagcagtttggaaacactctgtttgtaaagtctgcacgtggataacttgaccacttagaggcctttgttggaaacgggtttttttcatgtaaggctagacagaagaattctcagtaacttccttgtgttgtgtgtattcaactcacagagttgaacgatcctttacacagagcagacttttaacactctttttgtggaatttgcaagtggagatttcagccactttgaagtcaaaggtagaaaaggaaataacttcctataaaaactagacagaatgattctcagaaactcctttgtgatgtgtgcgttcaactcacagagtttcacctttcttttcatagagcagataggaaacactctgtttgtaaagtctgcaagtggatattcagacatccttgaggctttcgttggaaacgggatttcttcatattctgctagaaagaagaattctcagtaacttccttgtgttgtgtgtattcaactcacagagttgaacgatcctttacactcagcagacttgaaacactctttttgtggaatttgcaagtggagatttcagccgctttgaggtcaatggtagaataggaaatatcttcctatagaaactagacagaatgattctcagaaactcctttgtgatgtgtgtgttcaactcacagagtttaacctttcttttcatagagcagttaggaaacactctgtttgtaaagtctgcaagtggatattcagacctctttgaggccttcgttggaaacgcgtttttttcatataaggctagacagaagaattcccagtaacttccttgtgttgtgtgtgttcaagtcacagagttgaactttcctttacacagagaagatttgaaacactctttttgtggaatttgcaagtggagatttcaagcgctttgaggccaaaggcagaaaaggaaatatcttcgtttcaaaactagacagaatcattctcagaaactgctgcgtgatgtgtgcgttcaactctcagagtttaacttttcttttcattcagcggtttggaaacactctgtttgtaaagtctgcacgtggacactttgaccacttagaggccttctttggaaacgggttttttttatttaaggctagacagaagaattcccagtaacttccttgtgttgtgtgcattcaactcacagagttgaacgttcccttagacagagcagatttgaaacactctatttgtgcaatttgcaagtgtagatttcaagcgctttaaggtcaatggcagaaaaggaaatattttcgtttcaaaactagacagaatcattctcagaaactcctttgtgatgtgtgcgtttaactcacagagtttaacctttcttttcatagagcagttaggaaacactctgtttgtaaagtctgcaagtggatattcagacctctttgaggccttcgttggaaacgggatttcttcatattctgctagacagaagaattcttagtaacttccttgggttgtgtgtattcaactcacagagtggaacgatcctttacacagagcagacttgaaacactctttttgtggaatttgcaagtggagatttcagccgctttgaggtcaatggtagaaaaggaaatatcttcgtataaaaactagacagataatgattctcagaaagtcctttgtgatgtgtgtgttcaaatcacagagtttaacctttcttttcatagagcagttagtaaacactctgtttataaagtctgcaagtggataatcagacccctttgaggccttcgttggaaacgggatttcctcatattatgctagacagaagaattcccagtaacttccttgtgttgtgtgtgttcaactcacagagttgaactttcatttacacagagcagattggaaacactctttttgtggaatttgcaagtggagatttcaagcgctttgaggccaaaggcagaaaaggaaatatcttcatataaaaactagacagaatcattctcagaaactgctctgcgatgtgtgcgatcaactctcagagtttaacttttcttttcattcagcagtttggaaacactctgtttgtaaagtctgcacgtggatattttgaccacttagaggccttcgttggaaacgggtttctttcctgtaaggctagacagaagaattcacagtaagttccttgtgttgtgtgcattcacctcacagggttgaaggttcctttagacagagcagattggaaacactctttttgtgcaatttgcaagtggagatttcaagcgctttaaggtcaatggcagaaaaggaaatatcttcgtttcaaaactagacagaatcattcccacaaactgcgttgtgatgtgtgagttcaagtcaaagagtttaacctttcttttcatagagcagttaggaaacactctgtttgtaaagtctgcaagtggatattcagacctccttgaggccttcgttggaaacgggatttcttcatattctgctagacagaagaattctcagtaacttccttgtgttgtgtgtattcaactcacagagttgaacgatcctttacacagagcagacttgaaacactctttttgtggagtttgcaagtggagatttcagccgctttgaggtcaatagtagaaaaggaaatatcttcgtagaaaaactagacagaatgattctcagaaactccttagtgatgtgtgtgtccaactcacagggtttaacctttcttttcatagagcagttagcaaacactctgtttgtaaagtctgcaagaggatattcagacctctttgaggccttcgttggaaacgggtttttttcatataaggctagacagaagaattcccagtaacttccttgtgttgtgtgtgttcaactcacacagttgaactttcatttacagagagcagatttgaaacactctttttgtggaatttgcaaatggagatttcaagcgctttgaggccaaaggcagaaaaggaaatatcttcgtataaaaactagacagaatcattctcagaaactgctgcgtgatgtgtgcgttcaactctcagagtttaacttttcttttcattcagcggtttggaaacacactgtttgtaaagtctgcacgtggatattttgaccacttagaggccttcgttggaaacgggattttttcatgtaaggctagacagaagaattcccagtaatttccttgtgttgtgtgcattcagctcacagagttgaacgttcccttagacagagcagatttgaaacactctatttgtgcaatttgcaagtgtagatttcaagcgctttaaggtcaatggcagaaaaggaaatatcttcgtttcaaaactagacagaatcattcccacaaactgcgttgtgatgtgttcgttcaactcacagagtttaacctttctgttcatagagcagttaggaaacactctgtttgtaaagtctgcaagtggatattcagacctctttgaggccttcgttggaaacgggatttcttcatatgatgctagacagaagaattctcagtaacttccttgtgttgtgtgtattcaacttacagagttgaccgatcctttacacagagcagacttgtaacactctttttgtggaatttgcaagtggagatttcagccgctttgaagtcaaaggtagaaaaggaaatatcttcctataaaaactagacagaatgattctcagaaactcctttgtgatgtgtgtgttcaactcacagagtttaacctttcttttcatagagcagttaggaaacactctgtttctaaagtctgcaagtggatattcagacctctttgaggtcttcgttggaaacgggtttttttcatataaggctagacagaagaattcccagtaacttccttgtgttgtgtgtgttcaactcacagtgttgaactttcatttacacagagcagatttgaaacactctttttgtggaatttgcaagtggagatttcaagcgctgtgaggccaaaggcagaaaaggaaatatcttcgtataaaaactagacagaatcattctcagaaactgctctgcgatgtgtgcgttcaactctcagagtttaactttgcttttcattcagcagtttggaaacactctgtttctaaagtctgcacgtggataatttgaccacttagaggccttcgttggaaacgggtttttttcctgtaaggctagacagaagaattcccagtaacttccttgtgttgtgtgcattcaactcacagagttgaacgttcccttagacagagcagatttgaaacactctatttgtgcaatttgcaagtgtatatttcaagcgctttaaggtcaaaggcagaaaaggaaatatcttcgtttcaaaactagacagaatcattcccacaaactgcgttgtgatgtgttcgttcaactcacagagtttaacctttctgttcatagagcagttaggaaacactctgtttgtaaagtatgcaagtggatattcagacctccttgaggccttcattggaaacgggatttcttcatattctgctagactgaagaattctcagtaacttccttgtgttgtgtgtattcaactcacagagttgaacgatcctttacacagagcagacttgaaacactctttttgtggaatttgcaagtggagatttcagccgctttgaggtcaatagtagaaaaagaaatatcttcgtagaaaaactagacagaatgattctcagaaactcctttgtgatgtgtgcgttcaactcacagagtttaacctttctgttcatagagcagttaggaaacactctgtttgtaaagtctgcaagtggatattcagacctccttgaggccttcgttggaaacggtatttcttcatattctgctagacagaagaattctcagtcacttccttgtgttgtgtgtattcaactgacagagttgaactttcatttagagagagcagatttgaatcactgtttttgtggaatttgcaagtggagatttcaagcgctttggggccaaaggcagaaaaggatatatcttcgtataaaaactggacagaatcattctcagaaactgctctgcgatgtgtgcgttcaactctcagagtttaacttttcttttcattcagcagtttggaaacactctgtttgtaaagtctgcacgtggataacttgaccacttagaggccttcgttggaaacgggtttttttcatgtaaggctatacagaagaattcccagtaacttccttgtgttgtgtacattcaactcacagagttgaacgttcccttagacagagcagatttgaaacactctttttgtgcaattggcaaatggagatttcaagcgctttaagttcaaaggcagaaaaggaaatatcttcgtttcaaaactagacagaatcattcccacaaactgcgttgtgatgtgttcgttcaactcacagagtttaacctttctgttcatagagcagttaggaaacactctgtttgtaaagtctgtaagtggatattcagacatcttgtggccttcgttggaaacgggatttcttcatattctgctagacagaagaattctcagtaacttccttgtgttgtgtgtattcatcttacagagttgaacgatcctttacacagagcagacttgtaaaactctttttgtggaatttgcaagtggagatttcagccgctttgaagtcaaaggtagaaaaggaaatatcttcctataaaaactagacagaacgattctcagaaactcctttgtgatgtgtgcgttcaactcacagagtttaacctttcttttcatagagcagttaggaaacagtctgtttgtaaagtctgcaagtggatattcagacccctttgaggccttcgttggaaacgggatttcttcctattctgctagacagaagaattcccagtaacttccttgtgttgtgtgtgttcaactcacagagttgaactttcatttacacagagcagatttgaaacactctttttgtggaatttgcaaatggagatttcaagcgctttgcggccaaaggcagaaaaggaaatatcttcgtataaaaactagacagaatcattctcagaaactgctctgcgatgtgtgcgttcaactctcagagtttaacttttcttttcattcagcagtttggaaacactcggtttgtaaagtctgcacgtggatattttgaccacttagaggccttcgttggaaacgggtttttttcctgtaaggctagacagaagaattctcagtaacttccttgtgttgtgtgtattcaactcacagagttgaacgatcctttacacagagcagacttgtaacactctttttgtggaatttgaaagtggagatttcagccgctttgaagtcaaaggtagaaaaggaaatatcttcctataaaaactagacagaatgattctcagaaactcctttgtgatgtgtgcgttcaactcacagagtttaacttttcttttcatagagcagttaggaaacactcagtttgtaaagtctgcaagtggatattcagacctccttgaggccttcgttggaaaagggatttcctcatattatgctagacagaagaattctcagtaacttccttgtgttgtgtgtattcaactcacagagttgaacgatccttacagagagcagacttgaaacactctttttgtggaatttgcaagtggagatttcatccgctttgaggtcaatggtagaataggaaatatcttcctatagaaactagacagaatgattctcagaaactcctttgtgatgtgtgtgttcaactcacagagtttaacctttcttttcatagagcagttaggaaacactctgtttgtaaagtctgcaagtggatattcagacctctttgaggccttcgttggaaacgggtttttttcatataaggctacacagaagaattcccagtaacttccttgtgttgtgtgtgttcaactcacagagttgaactttcatttacacagagcagatttgaaacactctttttgtggaatttgcaagtggagatttcaagcgctttgaggccaaaggcagaaaaggaaatatcttcgtataaaaattagacagaatcattctcagaaactgctctgcgatgtgtgcgttcaactctcagagtttaacttttcttttcattcagcagtttggaaacactctggttgtaaagtctgcacgtggataacttgaccacttagaggccttcgttggaaacgggtttttttcctgtaaggctagacagaagaattcccaggaacttccttgtgttgtgtacattcaactcacagagttgaacgttcccttagacagagcagatttgaaacactctttttgtacaattggcaagtggtgatttcagccgctttgaggtcaatggtagaaaaggaaatatcttcgtataaaaactagacagaatgattctcagaaacttcattgtgacgtgtgcgttcaactcacagagtttaacctttcttttcatagagcagttaggaaacaccctgtttgtaaagtctgcaagtggatattcagacctctttgaggccttcgttggaaacgggatttcttcatactgtgctagacagaagaattctcagtaacttccttgtgttgtgtgtattcaactcacagagttgaacgatcctttacacagagcagattacaaacactctttttgtggaatttgcaagtggagatttcagccgctttgaggtcaatagtagaaaaggaaatatcttcgtataaaaactagacagaatgattctcagaaacggctttgtgatgtgtgtgttcaactcacagagtttaaccttccttttcatagagcagttagtaaacactctgtttataaagtctgcaagtggatattcagacccctttgaggccttcgttggaaacgggatttcttcatattatgctagacagaagaattcccagtaacttccttgtgttgtgtgtgttcaacccacagagttgaactttcatttacacagagcagatttgaaacactctttttgtggaatttgcaagtggagatgtcaagcgctttgaggccaaaggcagaaaaggaaatatcttcgtttcaaaactagacagaatcattctcagaaactgctctgcgatgtgtgcgttcaactctcagagtttaacttttcttttcattcagcagtttggaaacattctgtttgtaaagtctgcacgtggatattttgaccacttagaggccttcgttggaaacgggtttttttcctgtaaggctagacagaagaattcccagtaacttccttgtgttgtgtacattcaactcacagagttgaacgttcccttagacagagcagatttgaaacactctttttgtgcaattggcaagtggagatttcaagcgctttaaggtcaatggcagaaaaggaaatatcttcgtttgaaaactagacagaatcattcccacaaactgcgttgtgatgtgttcgttcaactcacagagtttaacctttcttttcatagagcagttaggaaacagtctgtttgtcaattctgtaagtggatattctgacatcttgtggcattcgttggaaacgggatttcttcatattactgctagacagaagaattctcagtaacttccttgtgttgtgtgtattcaactcacagagttgaacgatcctttacacagagcagacttgaaacactctttttgtggtatttgcaagtggagatttcagccgctttgaggtcaatggtagaataggaaatatcttcctatagaaactagacagaatgattctcagaaactcctttgtgatgtgtgtgttcaactcacagagttcaacctttcttttaatagagcagttgggaaacactctgtttgtaaagtctgcaagtggatattcagacttctttgaggccttcgttggaaacgggatttcttcatattatgctagacagaagaattctcagtaacttccttgtgttgtgtgtattcaactgacagagttgaactttcatttagagagagcagatttgaaacactgtttttgtggaatttgcaagtggagatttcaagcgctttggggccaaaagcagaaaaggaaatatcttcgtataaaaactagacagaatcattctcagaaactgctctgcgatgtgtgcgttcaactctcagagtttaacttttcttttcattcagcagtttggaaacactctgtttgtaaagtctgcacgtggatattttgacaacttagaggccttcgttggaaacgggtttttttcctgtaaggctagacagaagaattcccagtaaattccttgtgttgtgtgcattcaactcacagagttgaacgttcccttagacagagcagatttgaaacactctatttgtgcaatttgcaagtgtagatttcaagcgctttaaggtcaatggcagaaaaggaaatatcttcgattcaaaactagacagaatcattccctcaaactgcgttgtgatgtgttcgttcaactcacagagtttaacctttcttttcatagagcagttaggaaacagtctgtttgtaaattctgtaagtggatattctgacatcttgtggccttcgttggaaacgggatttcttcatattctgctagacagaagaattctcagtaacttccttgtgttgtgtgtattcaactcacagacttgaacgatcctttacacagagcagacttgtaacactctttttgtggaatttgcaagtggagatttcagccgctttgaagtcaaaggtagaaaaggaaatatcttcctataaaaactagacagaatgattctcagaaactcctttgtgatgtgtgcgttcaactcacagagtttatcttttcttttcatagagcagttaggaaacactctgtttgtaaagtctgcaagtggatattcagacctctttgaggccttcgttggaaacgggatttcttcatattctgctagacagaagaattcccagtaacttccttgtgttgtgtgtgttcaactcacagagttgaactctcatttacacagagcagatttgaaacactctttttgtggaatttgcaagtggagatttcaagcgctttgaggccaaaggcagaaaaggaaatatcttcgtataaaaactagacagaatcattctcagaaaccgctctgtgatgtgtgcgttcaactctcagagtttaacttttcttttcattcagcagtttggaaacactctgtttgtaaagtctccacgtggatattttgaccacttagaagccttcgttggaaacgtgtttttttttcatgtaaggctagacagaagaattcccaggaacttccttgcgttgtgtacattcaactcacagagttgaacgttcccttagacagagcagatttgaaacactctttttgtgcaattggcaagtggagatttcaagcgctttaaggtcaattgcagaaaaggaaatatcttcgtttcaaaactagacagaatgattctcagaaacttctttgtgatgtgtgcgttcaactcacagagtttaacctttcttttcatagagcagttaggaaacactctgtttgtaaactctgcaagtggatattcagacgtctttgaggccttcgttggaaacgggatttcttcatactgtgctagacagaagaattctcagtaacttcattgtgttgtgtgtattcaactcacagatttcaacgatcctttacacagagcagacttgaaacactctttttctggaatttgcaattggagatttcagccgctttgaggtcaatggtagaataggaaatatcttcctatagaaactagacagaatgattctcagaaactcctttgtgatgtgtgtgttcaactcacagattttaacctttcttttcatagagcagttagtaaacactctgtttataaagtctgcaagtggatattcagacccctttgaggccttcgttggaaacgggatttcttcatattctgctagacagaagaattctcagtaacttccttgtgttgtgtgtagtcaactcacagagttgaacgatcctttacagagagcagacttgaaacactctttttgtggaatttgcaagtggagatttcagccgctttgaggtcaatggaagaaaaggaaactatcttcgtataaagactagacagaatcattctcagaaactgctctgcgatgtgtgcgttcaactctcagagtttaacctttcttttcattcagcagttgggaaacactctgtttgtaaagtctgcacgtggataacttgaccacttagaggccttcgttggaaacgggtttttttcatgtaaggctagacagaagaattctcagtaacttccttgtgttgtgtgtattcaactcacagagttgaacgatcctttacacagagcagacttgtaacactctttttgtggaatttgcaagtggagatttcagccgctttgaagtcaaagttagaaaaggaaataacttcctataaaaactagacagaatcattcccacaaactgcgttgtgatgtgttcgttcaactcacagagtttaacctttcttttcatagagcagttaggaaacagtctgtttgtcaattctgtaagtggatattctgacatcttgtggccttcgttggaaacgggatttcttcatattctgctagacggaagaattctcagaatctttccttgtgttgtgtgtattcaactcacagaattgaacgatcctttacacagagcagacttgaaacactctttttgtggaatttgcaagtggagatttcagccgctttgaggtccatggtagaaaaggaaatatcttcgtataaaaactagacagaatgattctcagaaactcctttgtgatgtgtgcgttcaactcacagtttaacctttcttttcatagagcagttaggaaacactctgtttgtaaagtctgcaagtggatattcagacatctttgaggctttcgttggaaacggaatttcttcatattctgctagacagaagaattctcagtaacttccttgtgttgtgtgtattcaactgacagagttgaactttcatttagagagagcagatttgaaacactgtttttgtggaatttggaagtggagatttcaaacgctttggggccaaaggcagaaaagaaaatatattcgtataaaaactagacggaatcattctcagaaactgctgcgtgatgtgtgcgttcaactctcagagtttaacttttcttttcattcagcggtttggaaacactctgtttgtaaagtctgcacgtggatattttgaccacttagaggccttcgttggaaccgggttttttgcatgtaaggctagacagaagaattcccaggaacttccttgtgttgtgtacattcaactcacagagttgaacgttcccttagacagagtagatttgaaacactctttttgtgcaattggcaagtggtgatttcagccgctttgaggtcaatggtagaaaaggaaatatcttcgtataaaaactagacagaatcattcccacaaactgcgctgtgatgtgttcgttcatctcacagagtttaacctttcttttcatagagcagttaggaaacactctgtttgtaaattctgtaagtggatattctgacatcttgtggccttcgttggaaacgggatttcttcatattctgctagacagaagaattctcagaaacttccttgtgttgtgtgttttcaactcacagagttgaaccgatcctttacacagagcagacttgaaacactccttttgtggaatttgcaagtggagatttcagccgctttgaggtcaatggtagaataggaaatatcttcctatagaaagtagacagaatgattctcagaaactcctttgtgatgagtgcgttcaactcacagagtttaacctttcttttcatagagcagttaggaaacactctgtttttaaagtctgcacgtggatattttgacctctttgaggccttccttggaaacgggattttttcatataaggctagacagaagaattctcagtaacttccttgtgttgtgtgtattcaactgacagagttgaactttcatttagaccgagcagatttgaaacactatttatgtggaattggcaattggagatttcaagctctttgaggccaaaggcagaaaaggaaatatcttcgtttcaaaactagacagaatcattctcagaaactgctctgcgatgtgtgcgttgaactctcagagtttaacttttcttttcattcagcagtttggaaacactctgtttgtaaagtctgcacgtggatattttgaccacttagaggccttcgttggaaacgggtttttttcctgtaaggctagacagaagaattcccagtaacttccttgtgttgtgtgcattcaactcacagagttgaacgttcccttagacagagcagatttgaaacactctatttgtgcaatttgcaagtgtagatttcaagcgctttatggtcaacggcagaaaaggaaatatcttcgtttcaaaactagacagaatcattcccacaaactgcgttgtgatgtgttcgttcaactcacagagtttaacctttctgttcatagaacagttaggaaacactctgtaaagtctgtaagtggatattctgacatcttgtggccttcgttggaaacgggatttcttcatattctgctagacagaagaattctcagtaacttccttgggttgtgtgtattcaactcaccgagttgaaggatcctttacagagagcaggcttgaaacactctttttgtcgaatttgcaagtggagatttcagccgctttgaggtcaatggtagaataggaaatatcttcatataaagactagacagaatgattctcagaaactcctttgtgatgtgtgcgttcaactcacagagtttaacttttcttttcatagagcagttaggaaacactctgtttgtaaagtctgcaagtggatattccgacctctttgaggccttcgttggaaacgggatttcttcatattatgctggacagaagaattctcagtaacttccttgtgttgtgtgtattcaactgacagagttgaactttcatttagagagagcacatttgaaacactgtttttgtggaatttgcaagtggagatttcaagcgctttggggccaaaggcagaaaaggaaatatcttcgtataaaaactagacagaatcattctcagaaactgctgcgtgatgtgtgcgttcaactctcagagtttaacttttcttttcattcagcggtttggaaacactgtgtttgtaaagtctgcacgtggatattttgaccacttagaggccttcgttggaaacgggtttttttcatgtaaggctagacagaagaattcccagtaacttccttgtgttgtgtgcattccactcacagagttgaacgttcccttagacagagcagatttgaaacactctatttgtgcaatttgcaagtgtagatttcaagcgctttaaggtcaatggcagaaaaggaaatatcttcgtttcaaaactagacagaatcattcccacaaactgcgttgtgatgtgttcgttcaagtcacagagtttaacctttcttttcatagagcagttaggaaacagtctgtttgtcaattctgtaagtggatattctgacatcttgtggccttcgttggaaacgggatttcttcatattctgctagacagaagaattctcagtaacttccttgtgttgtgtgaattcaactcacagagttgaacgatcctttacacagagcagacttgaaacactgtttttgtggaatttgccagtggagatttcagccgctttgaggtcaatggtagaataggaaatatcttcctatagaaactagacagaatgattctcagaaactcctttgtgatgtgtgcgttcaactcacagagtttaaccttttttttcatagagcagttaggaaacactctgtttgtaaagtctgcaagtggatattcagacctctttgaggccttcgttggaaacgggttttttacatataaggctaaacagaagaattcccagtaacttccttgtgttgtgtgtgttcaactcacagagttgaactttcatttacccagagcagatttgaaacactctttttgtggaatttgcaagtggagatttcaagcgctttgaggctaaaggcagaaaaggaaatatcttcgtttcaaaactagacagaatcattctcagaaactgctctgcgatgtgtgcgttcaactctcagagtttaacttttcttttcattcagcagtttggaaacactctgtttgtaaagtctgcacgtggatattttgatagaggctttcgttggaaacgggtttttttcttgtaaggctagaaagaagaattcccagtaacttccttgtgttgtgtgcattcaactcacagagttgaacgttcccttagacagagcagatttgaaacactctatttgtccaatttgcaagtgtagatttcaagcgctttaaggtcaacggcagaaaaggaaatatcttcgtttcaaaactagacagaatgattctcagaaactcctttgtgatgtgtgcgttcaactcacagagtttaacctttcttttcatagagcagttaggaaacactctgtttgtaaagtctgcaagtggatattcacacctccttgaggccttcgttggaaacgggatttcttcacattctgctagacagaagaattctcagtaacttccttgtgttgtgtgtattcaactcactgagttgaacgatcctttacacagagcagacttgaaacactctttttgtggaatttgcaagtggagatttcagccgctttgaggtcaatggtagaaaaggaaactattttcgtataaagactagacagaatgattctcagaaactcctttgtgatgtgtgcgttcaactcacagagtttaacctttcttttcatagagcagttaggaaacactctgtttgtaaagtctgcacgtggatatttggacttctttgaggccttcgttggaaacggggtattttcatgtaaggctagacagaagaattcccagtaacttccttgtgttttgtgtgttcaactcacagagttgaactttcatttacacagagcagatttgaaacactctttttgtggaatttgcaaatggagatttcaagcgctttgaggccaaaggcagaaaaggaaatatcttcgtataaaaactagacagaatcattcccagaaactgctctgcgatgtgtgcgttcaactctcagagtttaacttttcttttcattcagcagtttggaaacactctgtttgtaaagtctgcacgtggatattttgaccatttagaggccttcgttggaaacgggtttttttcttgtaaggctagacagaagaattcccagtaacttccttgtgttgtgtacattcaactcacagagttgaacgttcccttagacagagcagatttgaaacactctttttgtgcaattggcaagtggagatttcaagcgctttgaggtcaatggcagaaaaggaaatatcttcgtttcaaaactagacagaatcattcccacaaactgcgttgtgatgtgttcgttcaactcacagagtttaacctttctgttcatagagcagttaggaaacactctgtttgtaaagtctgtaagtggatattctgacatcttgtggccttcgttggaaacgggatttcttcatattctgctagagagaagaatactcagtaacatccgcgtgttgtgtgtattcaactcagagagttgaacgatcctttacacagagcagacttgaaacactctttttgtggaatttgcaagtggagatttcagccgctttgaagtcaatggtagaaaaggaaatatcttcctataaaaactagacagaatgattctcagaaacttcattgtgatgtgtgcgttcaactcacagagtttaacctttcttttcatagaacagttaggaaacactctgtttgtaaactctgcaagtggatattcagacctctttgaggccttcgttggaaacgggttttttcatgtaaggctagacagaagaattctcagtaacttccttgtgttgtgtgtattcaactcacagagttgaatgatcctttacacagaacagtcttgaaacactctttttgtggaatttgcaagtggagatttcagccgctttgaggtcaatggtggaataggaaatatcttcctatagaaattagacagaatgattctcagaaactcctttgtgatgtgtgtgttcaactcacagagtttaacctttcttttcatagagcagttaggaaacactctgtttgtaaagtctgcaagtggatattcagacctctttgaggccttcgttggaaacgggatttcttcatattatgctagacagaagaattcccagtaacttccttgtgttgtgtgtgttcaactcacagagttgaactttcatttacacagagcagatttgaaacactctttttgtggaatttgcaagtggagatttcaagcgctttgaggccaaaggcagaaaaggaaatatcttcgtataaaaactggacagaatcattctcagaaactgctgcgtgatgtgtgcgttcaactctcagagtttaacttttcttttcattcagcggtttggaaacactctgtttgtaaagtctgcacgtggaaattttgaccacttagaggccttcgttggaaacgggtttttttcatataaggctagacagaagaattcccagtaacttccttgtgttgtgtgcattcaactcacagagttgaacgttcccttagacagagcagatttgaaacactctatttgtccaatttgcaagtgtagatttcaagcgctttaaggtcaacggcagaaaaggaaatatcttcgtttcaaaactagacagaatgattctcagaaaatcttttgtgatgtgtgcgttcaactcacagagtttaacttttcttctcatagagcagttaggaaacactctgtttgtaaagtctgcaagtggatatgcatacctctttgaggccttcgttggaaacgggatttcttcatattctgctagacagaagaattctcagtaacttccttgtgttgtgtgtattcaactcacagagttgaaggatcctttacagagagcaggcttgaaacactctttttgtcgaatttgcaaatggagatttcagccgctttgaggtcaatggtagaagaggaaatatcttcttatagaaactagacagaatgattctcagaaacttctttgtgatgtgtgcgttcaactcacagagtttaacctttcttttcatagagcagttaggaaacactgtgtttttaaactgtgcaagtggatattgagacctctttgaggccttctttggaaacgggatttcttcatactgtgctagacagaagaattcccagtaacttccatgtgttgtgtgtgttcaactcacagagttgaactttcatttacacagagcagatttgaaacactctttttgtggaatttgcaaatggagatttcaagcgctttgaggccaaaggcagaaagggaaatatcttcgtctaaaaactagacagaatcattctcagaaactgctctgcgatgtgtgcgttcaactctcagagtttaacttatcttttcattcagcagtttggaaacactctgtttgtaaagtctgcacgtggataatttgaccacttagaggtcttcgttggaaacgggtttttatcatgtaaggctagacagaagaattctcagtaacttccttgtgttgtgtgtattcaactgacagagttgaactttcatttagacagagcagatttgaaaaactctttatgtggaatttgcaagtggagatttcaagcgctttgaggccaaagacagaaaaggaaatatcttcgtataaaaactagacagaatcattccctcaaactgcgttgtgatgtgttcgatcaactcacggagtttaacctttcttttcatagagcagttaggaaacactctgtttgtaaactctgcaagtggatattcagacctctttgaggacttcgttggaaacgggatttcttcatattatgctagacagaagaattctcagtaacttctttgtgttgtgtgtattcaactcacagagtttaccgatcctttacacagagctgacctgaaacactctttttgtcgaatttgcaagtggagatttcagccgctttgaggtcaatggtagaataggaaatatcttcctatggaaattcgacagaatgattctcagaaaatcttttgtgatgtgtgcgttcaactcacagagtttaacttttcttctcatagagcagttaggaaacactctgtttgtaaagtctgcaagtggatattcagacctctttgaagccttcgttggaaacgggatttcttcatattatgctagacagaagaattctcagtaacttccttgtgttgtgtgtattcaactgacagagttgaactttcatttagagagagcagatttgaaacactctttttgtggaatttgcaagtggagatttcaagcgctttgaggccaaaggcagaaaaggaaatatcttcgtataaaaactagacagaatcattctcagaaactgctgcgtgatgtgtgcgttcaactctcagagtttaacttttcttttcattcagcggtttggaaacactctgtttgtaaagtctgcacgtggaaattttgaccacttagaggccttcgttggaaacgggattttttcatgtaaggctagacagaagaattcccagtaacttccttgtgttgtgtgcattcaactcacagagttgaacgttcccttagacagagcagatttgaaacactctatttgtgcaatttgcaagtgtagttttcaagctctttaaggtcaacggcagaaaaggaaatatcttggtttcaaaactagacagaatcattcccacaaactgcgttgtgatgtgttcgttcaactcagagagtttaacctttctgttcatagagcagttaggaaacactctgtttgtaaagtctgtaagtggatattctgacatcttgtggccttcgttggaaacgggatttcttcatattctgctagacagaagaattctcagtaacttccttgtgttgtgtgtattcaactcacagagttgaacgatcctttacacagagcagacttgaaacactctttttgtggaatttgcaagtggagatttcagcctctttgtggtcaatggtagaaaaggaaatatcttcgtataaagactagacagaatgattcccagaaactcctttgtgatgtgtgcgttcaactcacagagtttaacctttcttttcatagagcagttaggaaacactctgtttgtaaagtctgcaaggggatattcagacctctttgaggccttcgttggaaacgggatttcttcgtattctgctagatagaagaattctcagtaacttccttgtgttgtgtgtattcaactgacagagttgaactttcatttagagagagcagatttgaaactctgtttttgtggaatttgcaagtggagatttcaagcgctttgaggccaaaggcagaaaaggaaatatcttcgtataaaaactagacagaatcattctcagaaactgctctgcgatgtgtgcgttcaactctcagagtttaacttttcttttcattcagcagtttggaaacactctgtttgtaaactctgcacgtggatattttgaccacatagaggccttcgttggaaacgggtttctttcctgtaaggctagacagaagtattcccagtaacttccttgtgttgtgtacattcaactcacagagttgaacgttcccttagacagagcagatttgaaacactctttttgtgcaattggcaagtggagatttcaagcgctttaaggtcaatggcagaaaaggaaatatcttcgtttcaaaactagacagaatcattcccacaaactgcgttgtgatgtgttcgttcaactcacagagtttaacctttcttttcatagagcagttaggaaacagtctgtttgtaaattctgtaagtggatattctgacatcttgtggccttcgttgtaaacgggatttcttcatattctgctagacagaagaattctcagaaacttccttgtgctgtgggttttcaactcacagagttgaacgatcctttacacagagcagacttgaaacactccttttgtggaatttgcaagtggagatttcagccgctttgaggtcaatggtagaataggaaatatcttcctatagaaagtagacagaatgattctcagaaactcctttgtgatgtgtgcgttcaactcacagagtttaacctttcttttcatagagcagttaggaaacactctgtttgtaaattctgcaagtggatattcagacctctttgagaccttccttggaaacgggtttttttcatataaggctagacagaagaattcccagtaacttccttgtgttgtgtgtgttcaactcacagagctgaactttcatttacacagagcagatttgaaacactctttttgtggaatttgcaagtggagatttcaagcgctttaaggccaaaggcagaaaaggaaatatcttcgtttcaaaactagacagaatcattctcggaaactgctctgtgatgtgtgcgttcaactctcagagtttaacttttcttttcattcagcagtttggaaacactctgtttgtaaagtctgcacgtggatattttgaccacttaaaggccttcgttggaaacgtgtttttttcctgtaaggctagacagaagaattcccagtaacttccttgtgttgtgtacattcaactcacagagttgaacgttcccttagacagagcagatttgaaacactctttttgtgcaattggcaagtggagatttcaagcgctttgaggtcaatggcagaaaaggaaatatcttcgtttcaaaactagacagaatcattcccacaaactgcgttgtgatgtgttcgttcaactcacagagtttaacctttcttttcatagagcaggtaggaaacactctgttggtaaattctgtaagtggatattctgacatcttgtggccttcgttggaaacgggatttctacatattctgccagacagaagaattctcagaaacttacttgtgttgtgtgttttcaactctcagagttgaacgatcctttacacagagcagacttgaaacactccttttgtggaatttgcaagtggagatttcagccgctttgaggtcaaaggtagaataggaaatatcttcctatagaaagtagacagaatgattctcagaaactcctttgtgatgtgtgcgttcaactcacagagtttaacctttcttttcacagagcagttaggaaacactctgcttgtaaagtctgcaagtggatattcagccctctttgaggccttcgttggaaacgggtttttttcatataaggctagacagaagaattctcagaatcttccttgtgttgtgtgtattcaactcacagagttgaacgatccttttcacagagcagacttgaaacactctttttgtggaatttgcaagtggagatttcagccgcgttgaggtcaatggtagaaaaggaaatatgttcgtataaaaactagacagaatgattctcataaactcctttgtgaagtgtgcgttcaaatcacagagtttaacttttcttttcatagagcagttaggaaacactctgtttgtaaagtctgcaagtggatattcagacctctttgaagccttcgttggaaacgggatttcttcatattatgctagacagaagaattctcagtaacttccttgtgttgtgtgtattcaactcacagagttgaacgatcctttacacagagcagccttgaaacattctttttgtggaatttgcaagtggagatttcagccgctttgaggtcaatggtagaataggaaatatcttcctatagaaactagacagaatgattctcagaaactcctttgtgatgtgtgcgttctactcacagagtttaacctttcttttcatagagcagttaggaaacactctgtttgtaaagtctgcaagtggatatacagacctccttgaggccttcgttggaaacgggatttcttcatattatgctagacagaagaattcccagtaacttccttgtgttgtgtgtgttcaactcacagagttgaactttcatttacacagagcacatttgaaacactctttttgtggaatttgcaagtggagatttcaagcgctttgaggccaaaggcagaaaaggaaatatcttcgtttcaaaactagacagaatcattctcagaaactgctctgcgatgtgtgcgttcaactctcagagtttaacttttgttttcattcagcagtttggaaacactctgtttgtaaagtctgcacgtggataatttgaccacttagaggccttcgttggaaacgggttttttccatgtaaggctagacacaagaattcccagtaacttcccttgtgttgtgtacattcaactcacagagttgaacgttcccttagacagagcagatttgaaacactctttttgtgcaattggcaaatggagatttcaagcgctttaaggtcaatggcagaaaaggaaatatcttcgtttcaaaactagacagaatcattcccacaaactgcgttgtgatgtgttcgttcaactcacagcagtttaacctttctattcatagagcagttaggaaacactctgtttgtaaagtctgtaagtggatattctgacatcttgtggccttcgttggaaacgggatttcttcctattctgctagacagaagaattctcagtaacttccttgtgttgtgtgcattcaactcacagagttgaacgatcctttacacagagcagacttgaaacactctttttgtggaatttgcaagtggagatttcagccgctttgaggtcaatggtagaaaacgaaatatcttcgtatagaaactagacagaatgattctcagaaactcctttgtgatgtgtgtgttcaactcacagagtttaacctttcttttcatagagcagttaggaaacactctgtttgtaaagtctgcaagtggatattcagacctccttgaggccttcgttggaaacgggatttcttcatattctgctagacagaagaattctcagtaacttccttgtgttgtgtttattcaactcacagagttgaacgatcctttacacagagcagacttgaaacactctttttgtggaatttgcaagtggagatttcagccgctttgaggtcaatagtagaaaaggaaatatcttcgtagaaaaactagacagaatcattctcagaaactgctgcgtgatgtgtgcgttcaactctcagagtttaacttttcttttcattcagcggtttggaaacactctgtttgtaaagtctgcacgtggatattttgaccacttagaggccttcgttggaaacgggttttttgcatgtaaggctagacagaagaattcccagtaacttccttgtgttttgtacattcaacccacagagttgaacgtttccttagacagagcagatttgaaacactctttttgtgcaattggcaagtggtgatttcagccgctttcaggtcaaaggtagaaaaggaaatatcttcctataaaaactagacagaatcattcccacaaactgcgttgtgatgtgttcgttcaactcacagagtttaacctttctgttcatacagcagttaggaaacactctgtttgtaaagtctgtaagtggatattctgacattttgtggccttcgttggaaatgggatttcttcatattctgctagacagaagaattctcagtaagttccttgtgttgtgtgtattcaactcacagagttgaacgatcctttacacagagcagacttgaaacactctttttgtggaatttgcaagtggagatttcagccgctttgaggtcaatggcagaataggaaatatcttcctatagaaactagacagaatgattctcagaaactcctttgtgatgtgtgcgttcatctcacagagtttaacttttcttttcatagagcagttaggaaacactctgtttgtaaagtctgcatgtggatattcagacctctttgaggccttcgttcgaaaagggatttcttcatattatgctagacagaagaattctcagtaacttccttgtgttgtgtgtattcaactgacagagttgaactttcatttagagagagcagatttgaaacactgtttttgtggaatttgcaaatggagatttcaagcgctttggtgccaaaggcagaaaaggaaatatcttcgtataaaaactagactgaatcattctcagaaactgctgcgtgatgtgtgcgttcaactctcagagtttaacttttcttttcattcagcggtttggaaacactctgtttgtaaagtctgcacgtggatattttgaccacttagaggccttcgttggaaacgggttttttttcatgtaaggctagacagaagaattcccagtaacttccttctgttgtgtgcattcaactcacagagttgaacgttcccttagacagagcagatttgaaacactctatttgtgcaatttgcaagtgtagatttcaagcgctttaaggtcaacggcagaaaaggaaatatcttcgtttcaaaactagacagaatcattcccacaaactgcgttgtgatgtgttcgttcaactcacagagtttaacctttctgttcatagagcagttaggaaacactctgtttgtaaagtctgtaagtggatattctgacatcttgtggccttcgttggaaacgggatttcttcctattctgctagacagaataattctcagtaacttccttgtgttgtgtgtattcaactcacagagttgaaggatcctttacagagagcaggcttgaaacacactttttgtcgaatttgcaagtggagatttcagccgctttgaggtcaatggtagaataggaaatatcttcttatagaaactagacagattgattctcagaaactcctttgtgatgtgtgcgttcaactcacagagtttaacctttcttttcatagagcagttaggaaacactctctttgtaaagtctgcaagtggatattcagacctccttgaggccttcgttggaaacgggatttcttcatattatgctaggcagaagaattctcagtaacttccttgtgttgtgcgtattcaactcacagagttgaacgatcctttacacagagcagacgtgaaacactctttttgtggaatttgcaagtggagatttcagccgctttgaggtcaatggtagaataggaaatatcttcctatagaaactagacagaatcattctcagaaaatgctctgtgatgtgtgcgttcaactctcagagtttaacttttcttttcattcagcagtttggaaacactctgtttgtaaagtctgcacgtggatattttgaccacttagaggccttcgttggaaacgggtttttttcatgtaagggtagacagaagaattctcagtaacttccttgtgttgtgtgtattcaactcacagagttgaacgatcctttaaacagagcagacttgaaacactctatttgtgcaatttgcaagtgtagatttcaagcgctttaaggtcaatggcagaaaaggaaatatcttcgttttaaaactagacagaatcattcccacaaactgcgttgtgatgtgttcgttcaactcacagagtttaacttttctgttcatagagcagttaggaaacactctgtttgtaaagtctgcaattggatattcagacctccttgaggcattcgttggaaacgggatttcttcatattctgctagacagaataattctcagtaacttccttgtgttgtgtgtattcaactcacagagttgaacgatcctttacacagagcagacttgaaacattctttttgtggaatttgcaactggagatttcagccgctttgaggtcaatggtagaataggagatatcttcctatagaaactagacagaatgattctcagaaactcctttgtgatgtgtgcgttcaactcacagagtttaacctttcttttcatagagcagttaggaaacactctgtttgtaaactctgcaagtggatattcagacctccctgaggccttcgtcggaaatgggatttcttcatattctgctagacagaagaattcccagtaacttccttgtgttgtgtgtattcaactcacagagttgaactttcatttacacagagcaaatttgaaacactctttttgtggaatttgcaagtggagatttcaagcgctttgaggccaaaggcagaaaaggaaatatcttcgtataaaaactagacagaatcattctcagaaactgctctgcgatgtgtgcgttcaactctcagagtttaacttttcttttcattcagcagtttggaaacactctgtttgtaaagtctgcacgtggatattttgatcacttagaggccttcgttggaaacgggtttctttcttgtaaggctagacagaagaattcccagtaacttccttgtgttgtgtacattcaactcacaggagttgaacgttcccttagacagagcagatttgaaacactctttttgtgcaattggcaagtggagatttcaagcgctttatggtcaatggcagaaaaggaaatatcttcgtttcaaaactagacagaatcattcccacaaactgcgttgtgatgtgttcgttcaactcacagagtttaacctttcttttcatagagcagttaggaaagagtctgtttgtcaattctgtaagtggatattctgacatctagtggccttcgttggaaacgggatttcttcatattctgctagacagaagaattctcagtaacttccttgtgttgtgtgtattcaactcacagagttgaacgatcttttacagagagcagacttgaaacactctttttgtggaatttgcaagtggagatttcagccgctttgaagtcaaaggtagaataggaaatatcttcctatagaaactagacagaatgattctcagaaactcctttgtgatgtgtgcgttcaactcacagagtttaacctttcttttcatagagcagttaggaaacactctgtttgtaaagtctgcaagtggatattcagacctcattgaggccttcgttggaaacgggatttctacatattatgctagacagaagaattctcagtaacttccctgtgttgtgtgtattcaactgacagagttgaactttcatttagagagagcagatttgaaacactgtttttgtggaatttgcaagtggagatttcaagcgctttggggccaaaggcagaaaaggaaatatcttcgtataaaaactagacagaatcattctcagaaactgctctgcgatgtgtgcgttcaactctcagagtttaacttttcttttcattcagaagtttggaaacactctgtttgtaaagtctgcacgtggataacttgaccacttagaggccttcgttggaaacgggtttttttcatgtaaggctagacagaagaattcccagtaacttccttgtgttgtgtgcactcaactcacagagttgaacgttcccttagacagagcagatttgaaacactctatttgtgcaatttgcaagtggagatttcaagcgctttatggtcaatggaagaaaaggaaatatcttcgtttcaaaactagacagataatcattcccacaaactgcgttgtgatgtgttcgttcaactcacagtagtttaacctttcttttcatagagcagttaggaaacagtctgtttgaaaattctgtaagtggatattctgacatcttgtggccttcgttggaaacgggatttcttcatattctgctagacagaagaattctctgtaactgccttgtgttgtgtgtattcaactcacagagttgaacgatcctttacacagagcagacttgaaacactctttttttggaatttgcaagtggagatttcagccgctttgaggtcaatggtagaataggaaatatcttcctatagaaagtagacagaatgattctcagaaactcctttgtgatgtgtgtgttcaactcacagagtttaacctttcttttcatagagcagttaggaaacactctgtttgtaaagtatgcaagtggatattcagacctctttgaggccttcgttggaaacgggatttttcatataaggctagacagaagaattcccagtaacttccttgtgttgtgtgtgttcaactcacagagttgaactttcatttacacagagcagatttgagacactctttttgtggaatttgctaatggagatttcaagcgctttgaggccaaaggcagaaaaggaaatatcttcgtataaaaactagacagaatcattctcagaaactgctctgcgatgtgtgcgttcaactctcagagtttaacttttcttttccttcagcagtttggaaacactctgtttgtaaagtctgcacgtggatattttgaccacttagaggccttcgttggaaacgggtttttttcctgtaaggctagacagaagaattcccagtaacttccttgtgttgtgtgcattccactcacagagttgaacgttcccttagacagagcagatttgaaacactctatttgtgcaatttgcaagtgtagatttcaagcgctttaaggtcaatggcagaaaaggaaatatcttcgtttcaaaactagacagaattattcccacaaactgcgttgtgatgtgttcgttcaactcacagagtttaacctttcttttcatagagcagttaggaaacagtctgtttgtaaattctgtaagtggatattctgacatcttgtggccttcgttggaaacgggatttcttcatattctgctagacagaagaattctcagtaacttccttgtgttgtgtgtattcaactcacagagttgaacgatcctttacacagagcagacttgaaacactctttttctggaatttgcaagtggagatttcagccgctttgaggtcaatggtagaaaaggaaactatcttcttataaagactagacagaatgattctcagaaactcctttgtgatgtgtgcgttcaactaacagagtttaacctttcttttcatagagcagttaggaaacactctgtttgtaaagtctgcaagtggatattcagacctctttgaggccttcgttggaaacgggatttcttcatattctgctagacagaagaattctcagtaacttccttgtgttgtgtgtattcaactgacagagttgaactttcatttatggagagcagatttgaaacactggttttgtggaatttgccagtggagatttcaagcgctttggggccaaaggcagaaaaggaaatatcttcgtataaaaactagacagaatcattctcagaaactgctctgcgatgtgtgcgttcaactctcagagtttaacttttcttatcattcagcagtttggaaacactctgtttgtaaagtctgcacgtggataatttgaccacttagaggccttccttggaaacgggtttttttcatgtaaggctagacagaagaattcccagtaacttccttgtgttgtgtgcattcaactcacagagttgaacgttcccttagacagagcagatttgaaacactgtatttgtgcaatttgcaagtgtagatttcaagcgctttaaggtcaatggcagaaaaggaaatatcttcgtttcaaaactacacagaatcattcccacaaactgcgttgtgatgtgttcgttcaactcacagagtttaacctttcttttcatacagcagttaggaaacagtctgtttgtaaattctgtaagtggatattctgacatcttgtggccttcgttggaaacgggatttcttcatattctgctagacagaagaattctcagtaacttccttgtgttgtgtgtattcaactcacagagttgaacgatcctttacacagagcagacttgaaacactcgttttgtggaatttgcaagtggagatttcagccgcgttgaggtcaatggtagaaaaggaaatatcttcgtataaaaactagacagaatgattctcagaaactcctttctgatgtgtgcgttcaactcgcagagtttaacttttcttttcattgagcagttaggaaacactctgtttgtaaagtcagcaagtggatattcagacctctttgaggccttcgttggaaacgggatttctgcatattatgctagacagaaggattcccagtaacttccttgtgttgtgtgtgttcaactcacagagttgaactttcatttacacagaggagatttgaaacactctttttgtggaatttgcaggtggagatttcaagcgctttgaggccaaaggcagaaaaggaaatatcttcgtataaaaactagacagaatgattctcagaaactcctttgtgatgtgggcgttcaactcacagagtttaacgtttcttttcatagagccgttaggaaacactctgtttgtaaagtctgcacgtggatatttggacttctttgaggccttcgttggaaacgggtttttttcatgtaaggctagacggaagaattcccagtaacttccttgtgttgtgtgcattcaactcacagagctgaacgttcccttagacagagcagatttgaaacactctatttgtgcaatttgcaagtgtagatttcaagcgctttaaggtcaacggcagaaaaggaaatatcttcgtttcaaaactagacagaatcattcccacaaactgcgttgtgatgtgttctttcaactcacagagtttaacctttctgttcatagagcagttaggaaacactctgtttgtaaagtctgtaagtggatattctgacatcttgtggccttcgttggaaacgggatttcttcatattactgctagacagaataattctcagtaatttccttgtgttgtgtgtattcaactcacagagttgaaggatcctttacagagagcaggcttgaaacactctttttgtcgaatttgcaagtggagatttcagccgctttgaggtcaatggtagaataggaaatatcttcttatagaaactagacaaaatgattctcataaactcctttgtgatgtgtgcgttcaactcacagagtttaacctttcttttcatagagcagttaggaaacactctgtttgtaaagtctgcaagtggatattcagacctacttgaggccttcgttggaaacgggatttcttcatattctgctagacagaagaattcccagtaacttcccttgtgttgtgtgtgttcaactcacagagttgaactttcatttacacagagcagatttgaaacactctttttgtggaatttgaaagtggagatttcaagcgctttgaggccaaaggcagaaaaggaaatatcttcgtataaaaactagacagaatcattctcagaaactgctctgcgatgtgtgcgttcagctctcagagtttaacttttcttttcattcagcagtttggaaacactctgtttgtaaagtctgcacgtggatattttgaccacttggaggccttcattggaaacgggtttttttcatgtaaggctagacagaagaattcccagtaacttccttgtgttgtgtacattccactcacagagttgaacgttcccttagacagagcagatttgaaacactctttttgtgcaattggcaagtggagatttcaagcgctttaaggtcaatggcagaaaaggaaatatcttcgtttcaaaactagacagaatcattcccacaaactgcgttgtgatgtgttcgttcaactcacagagtttaacctttcttttcatagagcagttaggaaacagtctgtttgtaaattctgtaagtggatattctgacatcttgtggccttcgttggaaacgagatttcttcatattctgctagacagaagaattctcagaaacttccttgtgttgtgtgttttcaactcacagaggtgaacgatcctttacacagagcagacatgaaacagtctttttgtggaatttggaagtggagaattcagccgctttcaggtcaatggtagaataggaaatatcttcctatagaaaattgacagaatgattctcagaaactcctttgtgatgtgtgcgttcaactcacagagttcaacctttcttttcatagagcagttgggaaacactctgtttgtaaagtctgcatgtggatattcagacatccttgaggctttcgttggaaacgggatttcttcatattctgctagaaagaagaattctcagtaacttccttgtgttgtgtgtattcaactgacagagttgaactttcatttagagagagcagatttgaaacactgtttttgtggaatttgcaagtggagattttaagcgctttggggccaaaggcagaaaaggaaatatcttcgtataaaaactagacagaatcattctcagaaactgctctgcgatgtgtgcgttcaactctcagagtttaacttttcttttcattcagcagtttggaaacactctgtatgtaaagtctgcacgtggatattttgaccacttagaggccttcgttggaaacgggtttttttcctgtaaggctagacagaagaattcccagtaacttccttgtgttgtgtacattcaactcacagagttgaacgttcccttagacagagcagatttgaaacactctttttgtgcaattggcaaatggagatttcaagcgctttaagttcaaaggcagaaaaggaaatatcttcgtttcaaaactagacagaatgattctcagaaactcctttgtgatgtgtgcgttcaactcaaagagtttaacctttcttttcatagagcagttaggaaacactctgtttgtaaagtctgcaagtggatattcagacctctttgaggccttcgttggaaacgggatttcttcatattatgctagacagaagaattctcagtaacttccttgtgttgtgtgtattcaactcacagagttgaacgatcctttacacagagcagactttaaacactctttttgtggaatttgcaagtggagatttcagccgctttggggtcaatagtagaaaaggaaatatcttcgtagaaaaactagacagaatgattctcagaaaatcctttgtgatgtgtgcgttcaactcacagagtttaacttttcttttcatagagcagttaggaaacactctgtttgtaaagtcttcaagtggatattcagacctctttgaggccttcgttggaaacgggatttcttcatattatgctagacagaagaattctcagtaacttccttgcgttgtgtgtattcaactgatagagttgaactttcatttagacagagcagatttgaaacacgctttttgtggaatttgcaagtcgagatttcaagcgctttgaggccaaaggcagaaaaggaaatatcttcgtataaaaactagaccgaatcattctcagaaactgctctgcgatgtgtgcgttcaactctcagagtttaactttgcttttcattcagcagtttggaaacactctgtttgtaaagtctgcacgtggatattttgaccacttagaggccttcgttggaaacgggtttttttcctgtaaggctagacagaagaattcccagtaacttccttgtgttgtgtacattcaactcacagagttgaacgatcccttagacagagcagatttgaaacactctttttgtgcaattggcaaatggagatttcaagcactttaaggtcaatcgcagaaaaggaaatatcttcgtttcaaaactagacagaatgattctcagaaactcctttgtgatgtgtgcgttcaactcacagagtttaacttttcttttcatagagcagttaggaaacactctgtttgtaaagtctgcaagtggatattcagacgtctttgaggccttcgttggaaacgggatttcttcatattctgctagacagaagaattctcagtaacttccttgtgttttgtgtattcaactcacagagttgaacgatcctttacacagagcagacttgaaacacactttttgtggaatttgcaagtggagatttcagccgctttgaggtcaatggtagaataggaaatatcttcctatagaaactagacagaatgattctgagaaactcctttgtgatgtgtgcattcaactcacagagtttaacctttcttttcatagagcagttaggaaacactgtgcttgtatagtctgcaagtggatactcagacctccttgaggccttcgttggaaacgggatttcttcctattatgctagacagaagaattctcagtaactcccttgtgttgtgtgtattcaactgacagagttgaactttcatttagagggagcagatttgaaacactgtttttgtggaatttgcaagtggagatttcaaacgctttggggccaaaggcagaaaaggaaatatcttcgtataaaaactagacagaatcattctcagaaactgctctgcgatgtgtgcgttcaactctcagagtttaacttttcttttcattcagcagtttggaaacactctgtttgtaaagtctgcacgtgcataatttgaccacttagaggccttcgttggaaacggttttttttcatgtaaggctagacagaagaattcccagtaacttccttgtgttgtgtgcattcaactcacagagttgaacgttcccttagacagagcagatttgaaacactctatttgtgcaatttgcaagtgtagatttcaagcgcttaaagtcaacggcagaaaaggaaatatcttcgtttcaaaactagacagaatcattcccacaaactgcgttgtgatgtgttcgttcaactcacagagtttaacctttcttttcatagagcagttaggaaacactctgtttgtaaagtctgcaagtggatattcagacctctttgaggccttcgttggaaacgggatttcttcatatactgctggacagaggaattctcagtaacttccttgtgttgtgtgtattcaactcacagagttgaacgatcctttacacagagcagacttgaaacactctttttgtggaatttgcaagtggagatttcagccgctttgatgtcaatggtagaaaaggaaatatcttcgtataaagccgagacagaatgattctcagaaactcctttgtgatgtgtgcgttcaactcacagagtttaacctttcttttcatagagcagttagtaaacactctgtttataaagtctgcaagtggatattcagacccctttgaggccttcgttggaaacgggatttcttcatattctgctagacagaagaattcccagtaacttccttgtgttgtgtgtgttcgactcacagagttgaactttcatttacacagagcagatttgaaacactctttttgtggaatttgcaagtggagatttcaagcactttgaggccaaaggcagaaaaggaaatatacttcgtttcaaaactagacagaatcattctcagaaactgctctgcgatgtgtgcgttcaactctcagagtttaacttttcttttcattcagcagtttggaaacactctgtttgtaaagtcttcacgtggataatttgaccacttagaggccttcgttggaaacgggttttttcatgtaaggctagacagaagatttcccagtaacttccttgtgttgtgtacattcaactcacagagttgaacgttcccttagacagagcagatttgaaacactctttttgtgcaattggcaaatggagatttcaagcgctttaatgtcaatggcagaaaaggaaatatcttcgtttcaaaactagacagaatgattctcagaaactcctttgtgatgtgtgcgttcaactcacacagtttaacctttctgttcatagagcagttaggaaacactctgtttgtaaagtctgtaagtggatattctgacatcttgtggccttcgttggaaacgggatttcttcatattctgctagacagaagagttctcagtaacttccttgtgttgtgtgtattcaactcacacggttgaacgatcctttacacagagcagacttgtaacactctttttgtggaatttgcaagtggagatttcagccgctttgaagtcaaagtagaaaaggaaatatcttcctataaaaactagacagaatgattctcagaaactcctttgtgatgtgtgcgttcaactcacagagtttaacctttcttgtcatagagcagttaggaaacactctgtttgtaaagtctgcaagtggatattcagacatctttgaggctttcgttggaaacgggatttcttcatattctgctagacagaagaattctcagtaacttccttgttttgtgtgtattcaactgacagagttgaactttcatttagagagagcagatttgaaacacggtttttgcggaatttgcaagtggagatttcaagcgctttggggccaaaggcagaaaaggaaatatcttcgtataaaaactagacagaatcattctcagaaactgctgcgtggtgtgtgcgttcaactctcagagtttaacttttcttttcattcagcggtttggaaacactctgtttgtaaagtctgcacgtggatattttgaccacttagaggccttcgttggaaacgggttttcttcatgtaaggctagacagaagaattcccagtaacttccttgtgttgtgtgcattcaactcacagagttgaacgttcccttagacagagcagatttgaaacactctttttgtgcaattggcaagtggagatttcaagcgctttaaggtcaatggaagaaaaggaaatatcttcgtttcaaaactagacagaagaattctcagtaacttccttgtgttgtgtgtattcaactcacagagttgaacgatcctttacacagaacagacttgtaacactctttttgtggaatttgcaagtggagatttcagccattttgaagtcaaaggtagaaaaggaaataacttcctataaaaactagacagaatgattctcagaaactcctttgtgatgtgtgcgttcaactcacagagtttaacctttgttttcatagagcagttaggaaacactctgcttgtaaagtctgcaagtggatattcagccctctttgaggccttcgttggaaacgggtttttttcatataaggctagacagaagaattctcagtaacttccttgtgttgtgtgtattcaagtgacagagttgaactttcatttagagagagcagatttgaaacactgtttttgtggaatttgcaattggagatttcaagcgctttggggccgaaggcagaaaaggaaatatcttcgtataaaaactagacagaatcattctcagaaactgctctgcgatgggtgcgttcaactctcagagtttaactttgcttttcattcagcagtttggaaacactctgtttgtaaagtctgcacgtggataatttgaccacttagaggccttcgttggaaacgggtttttttcatgtaaggctagacagaagaattcccagtaacttccttgtgttctgtacattcaactcacagagttgaacgttcccttagacagagcagatttgaaacactctttttgtgcaattggcaagtggagatttcaagcgctttaaggtcaatggcagaaaaggaaatatcttcgtttcaaaactagacagaatgattctcagaaactcctttgtgatgtgtgcgttcaactcacagagtttaacctttctgttcatagagcagttaggaaacactctgtttgtaaagtctgcaagtggatattcagacctccttgaggccttcgttggaaacgggatttctttatattctgctagacagaagaattctcagtaacttccttgtgttgtgtgtattcaacacacagagttgaacgatcctttacacagagcagacttgaaacactctttttgtggaatttgcaagtggagatttcagcctctttgaggtcaatggtagaataggaaatatcttcctatagaaactagacagaatgattctgagaaactcctttgtgatgtgtgcgttcaactcacagagtttaacctttcttttcatagagcagtttggaaacactccgtttgtaaactctgcaagtggatattcagacctccttgagaccttccttggaaacgggatttcttcatattatgctagacagaagaattctcagtaacttcctagtgttgtgtgtattcaactgacagagttgaactttcatttagagagagcagatttgaaacactgtttttgtggaatttgcaagtggagatttcaagcggtttggggccaaaggcagaaaaggaaatatcttcgtataaaaactagacagaatcattctcagaaactgctgcgtgatgtgtgcgttcaactctcagagtttaacttttcttttcattcagcagtttggaaacactctgtttgtaaagtctgcacgtggaaattttgaccacttagaggccttcgttggaaacgggtttttttcatgtaaggctagacagaagaattcccagtaacttcccttgtgttgtgtgcattcaactcacagagttgaacgttcccttagacagagcagatttgaaacactctatttgtgcaatttgcaagtgtagttttcaagctcttttaggtcaacggcagaaaaggaaatatcttggtttcaaaactagacagaatcattcccacaaactgcgttgtgatgtgttcgttcaactcacagagtttaacctttctgttcatagagcagttaggaaacactctatttgtaaagtctgcaagtggatattcagacctccttgaggccttcgttggaaacgggatttcttcatattctgctagacagaagaattctcagaatcttccttgtgttgtgtgtattcaactcaccgagttgaacgatcctttacacagagcagacttgaaacactctttttgtggaatttgcaagtggagatttcagccgctttgaggtccatgttagaaaaggaaatatcttcgtacaaaaattgacagaatgattctcagaaacttctttgtgatgtgtgccttcaactcacagagtttaacctttcttttcatagagcagttaggaaacactctgtttgtaaagtctgcaagtggatattcagacctctttgaggccttcgttggaaacgggtttttttcatataaggctagacagaagaattcccagtaacttccttgtgttgtgtgtgttcaactcacagagttgaactttcatttacacagagcagattggaaacactctttttgtggaatttgcaagtggagatttcaagcgctttgaggacaaaggcagaaaaggaaatatcttcgtataaaaattagacagaatcattctcagaaactgctctgcgatgtgtgcgttcaactctcagagtttaacttttcttttcattcagcagtttggaaacactctgtttgtaaagtctgcacgtggatattttgaccacttagaggcctccgttggaaacgggtttctttcctgtaaggctagacagaagaattcccagtaacttccttgtgttgtgtgcattcaactcacagagttgaacgttcccttagacagagccgatttgaaacactctatttgtgcaattggcaagtgtagatttcaagcgctttaaggtcaacggcagaaaaggaaatatcttcgtttcaaaactagacagaatgattctcagaaactcctttgtgatttgtgcgttcaactcacagagtttaacttttcttttcatagagcagttaggaaacactctgtttgtaaagtgtgcaagtggatattcagacctctttgaggccttcgttggaaacgggatttcttcatattatgctagacagaataattctcagtaacttccttgtgttgtgtgtattcaactcacagagttcaacgatcctttacagagagcagacttgaaacactctttttgtggaatttgcaagtggagatttcagccgctttgaggtcaatggtagaataggaaatatcttcctatagaaactagacagaatgattctcagaaactcctttgtgatgtgtgcgttcaactcacagagtttaaccattcttttcatagagcagttaggaaacactctgtttgtaaagtctgcaaatggatattcagacctccttgaggccttcgttggaaacgggatttcttcatattctgctagacagaagaattctcagtaacttccttgtgttgtgtgtattcaactcacagacttgaatgatcctttacacagaacagtcttgaaacactctttttgtggaatttgcaagtggagatttcagccgatttgaggtcaatggtagaatagaaaatatcttcctatagaaactagacagaataattctcagaaactcctttgtgatgtgtgcgttcaactcacagagtttaacctttcttttcatagagcagttaggaaacactctgtttgtaaagtctgcaagtggatattcagacctctttgaggccttcgttggaaacgggtttttttcatataaggctggacagaagaattctcagtaacttccctgtgttgtgtgttttcaactgacagagttgaactttcatttagagagagcagatttgaaaaactgtttttgtggaatttgcaagtggagatttcaagcgttttggagccaaaggcagaaaaggaaatatcttcgtataaaaactagacagaatcattctcagaaactgctgcgtgatgtgtgcgttcaactctcagagtttaacttttcttttcattcagcggtttggaaacactctgtttgtaaagtctgcacgtggatattttgaccacttagaggccttcgttggaaacgggttttttcatgtaaggctagacagaagaattcccagtaacttccttgtgttgtgtacattccactcacagagttgaacgttcccttagacagagcagatttgaaacactctttttgtgcaattggcaaatggagatttcaagggctttaaggtcaatggcagaaaaggaaatatcttcgtttcaaaactagacagaatcattcccacaaactgcgttgtgatggttcgttcaactcacagagtttaaactttcttttcatagagcagttaggaaacagtctgtttgtcaattctgtaagtggatattctgacatcttgtggccttcgttggaaacgggatttcttcatattctcctagacagaagaattctcagaatcttccttgtgttgtgtgtattcaactcacagagttgaacgatcctttacacagagcagacttgaaacactctttttgtggaatttgcaagtggagatttcagccgctttgaggtccatggtagaaaaggaaatatctttgtataaaaactagacagaatgattctcaggaactcctttgtgatgtgtgtgttcaactcacagagtttaacctttcttttcatagagcagttagtaaacactctgtttataaagtctgtaagtgggtattcagacccctttggggccttcgttggaaacgggatttcttcatattatgctagacagaagaattctcagaaacttccttgtgttgtgtgtattcaactcacagagttgaacgatcgtttacacagagcagacttgaaacactctttttgtggaatttgcaagtggagatttcagccgctttgaggtcaatggtagaaaaggaaatatcttcgtataaaaactagacagaatgattctcagaaactcctttgtgatgtgtgcgttcaactcacagagttcaacctttcttttcacagagcagttgggaaacactctgtttgtaaagtctgcaagtggatattcagacttctttgaggccttcgttggaagcgggatttcttcatgttctgctagacagaagaattctcagtaacttccttgtgttgtgtgtattcaactgacagagttgaactttcatttagagagagcagatttgaaacacagtttttgtggaatttgcaagtggagatttcaagcgctatggggccaaaggcagaaaaggaaatatcttcgtataaaaactagacagaatcattctcagaaactgctgcgtgatgtgtgcgttcaactctcagagtttaacttttcttttcattcagcggtttggaaacactctgtttgtaaagtctgcacgtggatattttgaccacttagaggccttcgttggaaacgggtttctttcatgtaaggctagacagaagaattcccagtaacttccttgtgttgtgtgcattcaactcacagagttgaacgttcccttagacagagcagatttgaaacactctatttgtgcaatttgcaagtgtagatttcaagcgctttaaggtcaacggcagaaaagaaaatatcttcgtttcaaaactagacagaatcattcccacaaactgcgttgtgatgtgttcgttcaactcacagagtttaacctttcttttcatagagcagttaggaaacagtctgtttgtcaattctgtaagtggatattctgacatgcttgtggccttcgttggaaacgggatttcttcatattctgctagacagaagaattctcagtaacttccttgtgttgtgtgtattcaactcacagagttgaacgatcctttacacagagcagacttgaaacactctttctgtggaatttgcaagtggagatttcagccgctttgaggtcaatggtagaaaaggaaatatcttcgtataaagactagacagaatgattctcagaaacttctttgtgatgtgtgcgttcaactcacagagtttagcctttcttttcatagagcagttaggaaacactctgtttgtaaactctgcaagtggatattcagacctctttgaggccttcgttggaaactgggatttcttcatactatgctagacagaagaattcccagtaacttccatgtgttgtttgtgttcaactcacagagttgaactttcatttacacagagcagatttgaaacactctttttgtggaatttgcaaatggagatttcaagcgctttgaggccagaggcagaaaaggaaatatcttcgtataaaaactagacagaaatcattctcagaaactgctgcgtgatgtgtgcgttcaactctcagagtttaacttttcttttcattcagcggtttggaaacactctgtttgtaaagtctgcacgtggatattttgaccacttagaggccttcgttggaaacgggtttttttcatgtaaggctcgacagaagaattcccagtaacttctttgtgttgtgtgcattcaactcacagagttgaacgttcctttagaaagagcagatttgaaacactctttttgtgcaatttgcaagtggagatttcaagcgctttagggtcaatggcagaaaaggaaatatcttcgtttcaaaactagacagaatcattcacacaaactgcgttgtgatgtgtgcgttaaactcacagagtttaacctttcttttcatagagccgtctgtaagcgctctgtttgtcaagtctgcaagtggatattctgacctttttgtggacttcgttggaaacgggatttcttcctataatactagacagaagaattctcagtaacttccttgtgttgtgtgtattcaactcacggagttgaacgatcctttacacagagcagacttgaaacactctttttgtggaatttgcaagtggagatttcagccgctttggggtcaatggtagaaaaggaaatatcttcgtataaagactagacagaatgattctcagaaactcctttgtgatgtgtgcgttcaactcacagagttcaacctttcttttcatagagcagttaggaaacactctgtttgtaaagtctgcaagtggatattcagacatccttgaggctttcgttggaaacgggatttcttcatattctgctagaaagaagaattctcagtaacttccttgtgttgtgtgtattcaactgacagagttgaactttcatttagagagagcagatttgaaacactgtttttgtggaatttgcaagtggagatttcaagcgctttggggccaaaggcagaaaaggaaatatgcttcgtataaaaactagacagaatcattctctgaaactgctctgtgatgtgtgcgttcaactctcagagtttaacttttcttttcattcagcagtttggaaacactctgtttgtaaagtctgcacgtggatattttgactacttagaggccttcgttggaaacgggtttttttcatgtaaggctagacagaagaattcccagtaacttccttgtgttgtgtgcattcaactcacagagatgaacgttcccttagacagagcagatttgaaacactctatttgtgcaatttgcaagtgtagatttcaagcgctttaaggtcaatggcagaaaaggaaatatcttcgtttcaaaactagacagaatcattcccacaaactgcgttgtgatgtgttcgttcaactcacagagtttaacctttcttttcatagagcagttaggaaacactctgttggtaaattctgtaagtggatattctgacatcttgtggccttcgttggaaacgggatttcttcatattctgctagacagaagaattctcagaatcttccttgtgttgtgtgtattcaactcacagagttgaacgatcctttacacagagcagacttgaaacactctttttgtggaatttgcaagttgagatttcagccgctttgaggtccatggtagaaaaggaaatatcttcgtataaaactagacagaatgattctcagaaactcctttgtgatgtgtgtgttcaactcacaaagtttaacctttcttttcatagagcagttagtaaacactctgtttataaagtctgcaagtggatattcagacccctttgagaccttcgttggaaacgggatttcttcatattatgctagacagaagaattctcagtaacttccttgtgttgtgtgttttcaactgacagagttgaacattcatttagagagagcagatttgtaacactgtttttgtggaatttgcaagtggagatttcaagtgctttggggccaaaggcagaaaaggaaatatcttcgtataaaaactagacagaatcattctcagaaactgctgcatgatgtgtgcgttcaactctcagagtttaacttttcttttcattcagcggtttggaaacactctgtttgtaaagtctgcacgtggatattttgaccacttagaggccttccttggaaacgggttttttttcatgtaaggctagacagaagaattctcagtaacttcattgtgttgtgtgtattcaactcacagatttcaacgatcctttacacagagcagacttgaaacactctttttctggtatttgcaagtggagatttcagccgctttgaggtcaatggtagaataggaaatatcttcctatagaaactagacagaatgattctcagaaactcctttgtgatgtgtgcgttcaactcacagagttcaacctttcttttcatagagcagttgggaaacactctgtttgtaaagtctgcaagtggatattcagacttctttgaggccttcgttggaagcgggttttcttcatattctgcttgacagaagaattctcagtaacttccttgtgttgtgtgtattcaactcacagagttgaacgatcctttacacagagcagacttgaaacactctttttgtggaatttgaaagtggagatttcagccgctttgaggtcaatggtagaataggaaatatcttcctatagaaactagacagaatgattctcagaaacttctttgtgatgtgtgcgttcaactcacggagtttaacctttcttttcatagagcagttaggaaacactctgtttgtaaactctgcaagtggatattcagacctctttgaggccttcgttggaaacgggatttcttcatactatgctagacagaagaattcccagtaacttccttgtgttgtgtgtgttcaactcacagagttgaactttcatttacacagagcagatttgaaacactctttttgtggaatttgcaaatggagatttcaagcgctttgaggccaaagacagaaaaggaaatatcttcgtataaaaactagacagaatcattctcagaaactgctctgcgatgtgtgcgttcaactctcagagtttaacttttcttttcattcagcagtgtggaaacactctgtttgtaaactctgcacgtggatattttgaccacttagaggccttcgttggaaacgggtttttttcctgtaaggctagacagaagaattcccagtaacttccttgtgttgtgtgcattcaactcacagagttgaacgttccttagacagagcagatttgaaacactctatttgtgcaatttgcaagtgtagatttcaagcgctttaaggtcaatggcagaaaaggaaatatcttcgtttcaaaactagacagaatcattcccacaaactgcgttgtgatgtgttcgttcaactcacagagtttaccctttcttttcttagagcagttaggaaacagtctgtttgtaaattctgtaagtggttattctgacatcttgtggccttcgttggaaacgggatttcttcatattctgctagacagaagaattctcagtaacttccttgtgttgtgtgtattcaactcacagagttcaccgatcctttacacagagcagacttgtaacactctttttgtggaatttgcaagtggagatttcagccgctttgaagtcaaaggtagaaaagggaatatcttcctataaaaactagacagaatgattctcagaaactcctttgtgatgtgtgcgttcaacacacagagtttaacttttcttttcatagagcggttaggaaacactctgtttgtaaagtctgcaagtggatattcagacctctttgaggccttcgttggaaacgggatttcttcatattctgctagacagaagaattcccagtaacttccttgtgttgtgtgtgttcaactcacagagttgaactttcatttacacagagcagatttgaaacactctttttgtggaatatgcaagtggagatttcaagcgctttgaggccaaaggcagaaaaggaaatatcttcgtataaaaactagacagaatcattctcagagactgctctgtgatgtgtgcgttcaactctcagagtttaacttttcttttcattcagcagtttggaaacactctgtttgtaaagtctgcacgtggataatttgaccacttagaggccttcgttggaaacgggtttttttcatgtaaggctagacagaagaattcccagtaacttccttgtgttgtgtacattcaactcacagagttgaacgttcccttagacagagcagatttgaaacactctttttgtgcaattggcaaatggagatttcaagcgctttaagttcaatggcagaaaaggaaatatcttcgtttcaaaactagacagaatgattctcagaaactcctttgtgatgtgtgcgttcatctcacagagtttaacctttcttttcgtagagcagttaggaaacagtctgtttgtaaattctgtaagtggatattctgacatcttgtggccttcgttggaaacgggatttcttcatattctgctagacagaagaattctcagtaacttccttgtgttgtgtgtattcaactcacagagttgaacgaacctttacacagagcagacttgtaacactctttttgtggaatttgcaattggaattttcagccgctttgaagtcaaaggtagaaaaggaaatatcttcctataaaaactagacagaaatgattctcagaaactcctttgtgatgtgtgcgttcaactcacagagtttaacctttcttttcatagagcagttaggaaacactctgtttgtaaagtctgcaagtggatattcagacctctttgaggccttcgttggaaacgggtttttttcatataaggctagacagaagaattctcagtaacttccttgtgttgtgtgtattcaactgacagagttgaactttcatttagagagagcagatttgaaacactgtttttgtggaatttgcaagtggagatttcaagcgcttttgggccaaaggcagaaaaggaaatatcttcgtataaaaactagacagaatcattctcagaaactgctctgcgatgtgtgcgttcaactctcagagtttaacttttcttttcattcagcagtttggaaacactctgtttgtaaagtctgcacgtggataacttgaccacttagaggccttcgttggaaacgggtttttttcttgtaaggctagacagaagaattcccaggaacttccttgtgttgtgtacattcaactcacagagttgaacgttcccttagacagagcagatttgaaacactctttttgtgcaattggcaagtggtgatttcagccgctttgaggtcaatggtagaaaaggaaatatcttcgtataaaaactagacagaatcattcccacaaactgcgttgtgatgtgttcagttcaactcacagagtttaacctttctgttcatagagcagttaggaaacactctgtttgtaaagtctgtaagtggatattctgacatcttgtggccttcgttggaaacgggatttcttcatattctgctagacagaagaattctcagtaacttccttgtgttgtgtgtattgaactcgcagagttgaacgatcctttacacagagcagacttgaaacactctttttgtggaatttgcaagtggagatttcagccactttgaggtcaatagtagaaaaggaaatatcttcgtagaaaaactagacagaatgattctcagaaaatcttttgtgatgtgtgcgttcaactcacagagtttaacttttcttctcatagagcagttaggaaacactctgtttgtaaagtctgcaagtggatagtggatattcagacctctttgaggtcttcgttggaaacgggatttcttcatattatgctagacagaagaattcccagtaacttccttgtgttgtgggtgttcgactcacagagttgaactttcatttacacagagcagatttgaaacactctttctgtggaatttgcaagtggagatttcaagcgctttgaggccaaaggcagaaaaggaaatatcttcgtttcaaaactagacagaatcattctcagaaactgctctgcgatgtgtgcgttcaactctcagactttaacttttcttttcattcagcaatttggaaacactctgtttgtaaagtctgcacgtggatattttgaccacttagaggccttcgttggaaacgggtttttttcctgtaaggctagacagaagcattcccagtaacttccttgtgttgtgtgcattcaactcacagagatgaacgttcccttagacagagcagatttgagacactctatttgtgcaatttgcaagtgtagatttcaagcgctttaaggtcaatggcagaaaaggaaatatcttcgtttcaaaactagacagaatcattcccacaaactgcgtagtgatgtgttcgttcaacttacagagtttaacctttctgttcatagagcagttaggaaacactctgtttgtaaagtccgtaagtggatattctgacatcttgtggccttgtttggaaaccggacttcttcatatactgctagacagaagaattctcagtaacttccttgtgttgtgtgtattcaactcacagagttgaacgatcctttacacagagcagacttgaaacactctttttgtggaatttgcaagtggagatttcagccgctttgaggtcaatggtagaaaaggaaatatcttcgtagaaaaactagacagaacgattctcagaaactcctttgtgatgtgtgcgttcaactcacagagtttaacttttcttttaatatagcagttaggaaacactctgtttgtaaagtctgcaagtggatattcagacctctttgaggccttcgttggaaacgggatttcttcatattctgttagacagaagaattctcagtaacttcccttgtgttttgtgtattcaactcacagagttgaacgatcctttacacagagcagacttgaaacactctttttgtggaatttgcaagtggagatttcagccgctttcaggtcaatagtagaaaaggaaatatcttcgtagaaaaactagacagaatgattctcagaaactcctttgtgatgtgtgcgttcaactcacagagtttaacctttcttctcatagagcagttaggaaacactctgtttgtaaagtctgcaagtggatattcagacatctttgaggccttcgttggaaacgggatttcttcatgttctgctagacagaagaattctcagtaacttccttgtgttgtgtgtattcaactgacagagttgaactttcatttagagagagcagatttgaaactctgtttttgtggaatttgcaagtggagatttcaagcgctttggggccaaaggcagaaaaggaaatatcttcgtacaaaaactagacagaatcattatcagaaactgctgcgtgatgtgtgcgttcaactctcagagtttaacttttcttttcattcagcggtttggaaacactctgtttgtaaagtctgcacgtggaaattttgaccacttagaggccttcgttggaaacgggtttttttcatgtaaggctagacagaagaattcccagtaacttccttgcgttgtgtacattcaactcacagagttgaacgttcccttagacagagcagatttgaaacactctttttgttcaattggcaagtggagatttcaagcgctttaaggtcaatggcagaaaaggaaatatcttcgtttcaaaactagacagaatcattcccacaaactgcgttgtgatgtgttcgttcatctcacagagtttaacctttcttttcatagagcagttaggaaacagtctgtttgtaaattctgtaagtggatattccgacatcttgtggccttcgttggaaacgggatttcttcatattctgctagacagaagaattctcagtaacttccttgtgttgtgtgtattcaactcacagagttgaacgatcctttacacagagcagacttgaaacactctttgtgtggaatttgcaagtggagatttcagccgctttgaggtcaatagtagaaaaggaaatatcttcgtagaaaaactagacagaatgattctcagaaactcctttgagatgtgtgtgttcaactcacagagtttaacctttcttttcatagagcagttaggaatcactctgtttttaaagtctgcaagtggatattcagacctctttgaggccttcgttggaaaagggtttttttcatataaggctagagagaagaattcccagtaccttccttgtgttgtgtgtgttcaactcacagatttgaactttcatttacacagagcagatttgaaacactctttttgtggaatttgcaaatggagatttcaagcgctttgaggccaaaggcagaaaaggaaatatcttcgtataaaaactagacagaatcattctcagaaactgctgtgtgatgtgtgcgttcaactctcagagtttaacttttcttttcattcagcggtttggaaacactctgtttgtaaagtctgcacgtggatattttgaccacttagaggccttcgttggaaacgggattttttcatgtaaggctagacagaagaattcccagtaacttccttgtgttgtgtacattcaactcacagagttgaacgttcccttagacagagcagatttgaaacactctttttgtgcaattggcaagtggagatttcagccgctttgaagtcaaatgtagaaaaggaaatatcttcctataaaaactagacagaatcattcccacaaactgcgttgtgatgtgtacgttcaactcacagagtttaacctttctgttcatagagcagttaggaaacactctgtttgtaaagtctgtaagtggatattctgacatcttgtggccttcgttggaaacgggatttcttcatattctgctagacagaagaattctcagtaacttccttgtgttgtgtgtattcaactcacagagttgaacgatcctttacacagagcagacttgtaacactctttttgtggaatttgcaagtggagatttcagccgctttgaagtcaaaggtagaaaaaaaatatcttcctataaaaactagacagaatgattctcagaaactcctttgtgatgtgtgccgttcaactcacagagtttaacctttcttttcatagagcagttaggaaacactctgcttgtaaagtctgcaagtggatattcagccctctttgaggccttcgttggaaacgggtttttttcatataaggctagacagaagaattctcagtaacttccttgtgttgtgtgtattcaactgacagagttgaactttcatttagagagagcagatttgaaacactgtttttgtcgaatttccaatggagatttcaagcgctttggggccaaaggcagaaaaggaaatatcttcgtataaaaactagacagaatcattctcagaaactgctctgtgatgtgtgcgttcaactctcagagtttaacttttcttttcattcagcagtttgaaacactctgtttgtaaactctgcacgtggataattggaccacttagaggccttcgttggaaaagggtttttttcctgtcaggctagacagaagaattcccagtaatttccttgtgttgtgtacattcaactcacagagttgaacgttcccttagacagagcagatttgaaacactctttttgtgcaattggcaaatggagatttcaagcgctttaaggtcaatggcagaaaaggaaatatcttcgtttcaaaactagacagaatgattctcagaaactccttagtgatgtgtgcgttcaactcacaaagtttaacctttctgttcatagagcagttaggaaacactctgtttgtaaagtctgcaagtggatattcagacctccttgaggccttcgttggaaacgggatttcttcatattctgctagacagaagaattctcagtaacttccttgtgttgtgtgtattcaactcacagagttgaacgatcctttacacagagcagacttgaagcactctttttgtggaatttgcaagtggagatttcagccgctttgaggtcaatagtagaaaggaaatatcttcgtagaaaaactagacagaatgattctcagaaaatcctttgtgatgtgtgcgttcaactcacagagtttaacttttcttttcatagagcagttaggaaacactctgtttgtaacgtctgcaagtggatattcagacctccttgaggccttcgttggaaacgggatttcttcatattctgctagacagaagaattctcagtaacttccttgtgttgtgtgtattcaactgacagagttgaactttcatttagagagagtagttttgaaacacttttttttgtggaatttgcaagtggagatttcaagcgctttggggccaaaggcagaaaaggaaatatcttcgtataaaaactagacagaatcattctcagaaactgctgcgtgatgtgtgcgttcaactcacagagtttaacttttcttttcattcagcggtttggaaacactctgtttgtaaagtctgcacgtggaaattttgaccacttagaggccttcgttggaaacgggtttttttcatgtaaggctagacagaagaattcccagtaacttccttgtgttgtgtgcattcaactcacagagatgaaagttcccttcgacagagcagatttgaaacactctatttgtgccatttgcaagtgtagatttcaagcgctttaaggtcaatggcagaaaaggaaatatcttcgtttcaaaactagacagaatcattcccacaaactgcgttgtgatgtgttcgttcaactcacagagtttaacctttcttttcatagagcagttaggaaacagtctgtttgtcaattctgtaagtggatattctgacatcttgtggctcttcgttggaaacgggatttcttcatattctgctagacagaagaattcccagtaacttccttgtgttgtgtacattcaactcacagagttgaacgttcccttagacagagcagacttgtaacactctttttgtggaatttgcaagtggagttttcagccgcttttaagtcaatggtagaaaaggtaatatcttcctataaaaactagacagaatgattctcagaaactcctttgtgatgtgtgcgttcaactcacagagttcaacctttcttttcatagagtagttggaaaacactctgtttgtaaagtctgcaagtggatattcagacttctttgaggccttcgttggaagcgggatttcttcatattctgctagacagaagaattctcagtaacttccttgtgttgtgtgtattcaactgacagagttaaactttcatttagagagagcagatttgaaacactgtttttgtggaatttgcaagtggagatttcaagcactttggggccaaaggcagaaaactaaatatcttcgtataaaaactagacagaatcattctcagaaactgctgcatgatgtgtgcgttcaactctcagagtttaacttttcttttcattcagcggtttggaaacactctgtttgtaaagtctgcacttggatattttgaccacttagaagccttcgttggaaacgggtttttttcatataaggctagacagaagaattcccagtaacttccttgtgttgtgtgcattcaactcacagagttgaacgttcccttagacagagcagatttgaaacactctatttgtgcaatttgcaagtgtagatttcaagcgctttaaggtcaacggcagaaaaaggaaatatcttcgtttcaaaactagacagaatcattcccacaaactgcgttgtgatgtgttcgttcaactcacagactttaacctttcttttcatagagcagttaggaaacagtctgtttgtcaattctgtaagtggatattctgtcatcttgtggccttcgttggaaacgggatttcttcatattctgctagacagaagaattctcagtaacttccttgtgttgtgtgtattcaactcacagagttgaacgatcctttacacagagcagacttgtaacactctttttgtggaatttgcaagtggagatttcagccgctttgaagtcaaaggtagaaaaggaaatatcttctctataaaaactagacagaatgattctcagaaactcctttgtgatgtgtgcgttcaactcacagagtttaacttttcttttcatagagcagttaagaaacactctgtttgtaatgtctgcaagtggatattcagacctccttgaggccttctttggaaacgggatttcttcatattctgctagacagaataattctcagtaacttccttgtgttgtgtgtattcaactgacagagttgaactttcatttagagagagcagatttgaaacactgtttttgtggaatttgcaagtggagatttcaagcgctttggggccaaaggcagaaaaggaaatatcttcgtataaaaactagacagaatgattctcagaaactcctttgtgatgtgtgccttcaactcacagagtttaacctttcttttcatagagtagttaggaaacactctgtttgtaaagtctgcaagtggatattcagacctctttgaggccttcgttggaaacgggtttttttcatataaggctagacagaagaattctcagtaacttccttgtgttgtgtacattcaactcacaagagttgaacgttcccttagacagagcagatttgaaacactctttttgtgcaattggcaagtggtgatttcagccgctttgaggtcaatggtagaaaaggaaatatcttcgtataaaaactagacagaatcatccccataaactgcgttgtgatgtgttcgttcaactcacagagtttaacctttcttttcatagagcagttaggaaacagtctgtttgtcaattctgtaagtggatattctgacatcttgtggccttagttggaaacgggatttcttcatattctgctagacagaagaattctcagtaacttccttgtgttgtgtgtattcaactcacagagttgaacgatcctttacacagagcagacttgaaaaactctttttgtggaatttgcaagtggagatttcagccgctttgagttcaatggtagaataggaaatatcttcctatagaaactagacagaatgattctcaaaaactcctttgtgatgtgtacgttcaactcacagagtttaacctttcttttcatagagcagttaggaaacactctgtttgtaaagtctgcaagtggatattcagacctctttgaggccttcgttggaaacgggtttttttcatataaggctagacagaagaattctcagtaacttccttgtgttgtttgtattcaactcacagagttgaactttcatttacacagagcagatttgaaacactctttttgtggaatttgcaaatggagatttcaagcgctttgaggccaaaggcagaaaaggaaatatcttcgtataaaaactagacagaatcattctcagaaactgctctgcgatgtgtgcattcaactctcagagtttaatttttcttttcattcagcagtttggaaacattctctttgtgaagtctgcacgtggatattttgaccacttagaggccttcgttggaaacgggttttattcttgtaaggctagacagaagaattctcagtaacttccttgtgttgtgtgtattcaactcacagagtggaacgatcctttacacagagcagacttgaaacactctttttgtggaatttgcaagtggagatttctgccgctttgaggtcaattgtagaataggaaatatcttcctatagaaactagacagaatgattctcagaaactcatttgtgatgtgtgcgttcaactcacagagtttaacctttcttttcatagagcagttaggaaacactctgtttgtaaagtctgcaagtggatattcagacctctttgtggccttcgttggaaacgggatttcttcatatgatgctagacagaagaattctcagaatcttccttgtgtggtgtgtattcaactcacagagttgaacgatggtttacacagagcagatttgaaacactctttttgtggaatttgcaagtggagatttcagccgctttgaggtcaatggtagaaaaggaaatatcttcgtataaaaactagacagaatgattctcaggaaactcctttgtgatgtgtgtgttcaactcacagagtttaacctttcttttcatagagcagttaggaaacactctgtttgtaaagtctgcaagtggatattcagacctctttgaggccttcgttggaaacgggtttttttcatataaggctagacagaagaattcccagtaacttccttgtgttgtgtgtgttaaactcacagagttgaacttccatttacacagagcagatttgaaacactctttttgtggaatttgcaagtggagatttcaagcgctttgaggccaaaggcagaaaaggaaatatcttcgtttcaaaactagacagataatcattctcagaaactgctctgcgatgtgtgcgttcaactctcagagtttaacttttcttttcattcagcagtttggaaacactctgtttgtaaagtctgcaggtggatattttgaccactcagaggccttcgttggaaacgggtttttttcctgtaaggctagacagaagaattcccagtaacttccttgtgttgtgtgcattcaagtcacagagttgaacgttcccttagacagagcagatttgaaacactctatttgtgcaatctccaagtgtagatttcaagcgctttaaggtcaacggcagaaaagataatatcttcgtttcaaaactagacagaatcattcccacaaactgcgttgtgatgtgttcgttcaactcacagagtttaacctttctgttcatagtgcagttaggaaacactctgtttgtaaagtctgtaagtggatattctgacatcttgtggccttcgttggaaacgggatttcttcatattctgctagacagaagaattctcagtaacttccttgtgttgtgtgtattcaactcacagagttgaacgatcctttacacagagcagacttgaaacactctttttgtggaatttgcaagtggagatttcagccgctttgtggtcaatggtagaaaaggaaatatcttcgtataaaaactagacagaatgattctcagaaactcctttgtgatgtgtgcgttcaactcacagagtttaacctttcttttcatagagcagttaggaaacactctgtttgtaaagtctgcaagtggatattgagacctccttgaggccttcgttggaaacgggatttcttcatattatgctagacagaagaattcccagtaacttccttgtgttgtgtgtgttcaactcacagagttgaactttcatttacacagagcagatttgaaacactctttttgtggaatttgcaggtggagatttcaagccctttgaggccaaaggcagaaaaggaaatatcttcgtataaaaactagacagagtcattctcagaaactgctgcgtgatgtgtgcgttcaactctcagagtttaacttttcttttcattcagcggtttggaaacactctgtttgtaaagtctgcatgtggaaattttgaccatttagaggccttcgttggaaacgggtttttttcatgtaaggctagacagaagaattcccagtaacttccttgtgttgtgtacattcaactcacagagttgaacgttcccttagacagagcatatttgaaacactctttttgtgcaattggcaagtggagatttcaagcgctttaaggtcaatgggagaaaaggaaatatcttcgtttcaaaactagacagaatcattcccacaaactgcgttgtgatgtgttcgttcatctcacagagtttaacctttcttttcatagagcagttaggaaacagtctgtttgtaaattctgtaagtggatattctgacatcttgtggccttcgttggaaacgggatttcttcatattctgctagacggaagaattctcagtaacttccttgtgttgtgtgtattcaactcacagagttgaacgatcctttacacagagcagccttgaaacactctttttgtggaatttgcaagtggagatttcagccgctttgaggtcaatggtagaataggaaatatcttcctatagaaactagacagaatgattctcagaaactcctttgtgatgtgtgtgtccaactcacagagtttaacctttcttttcatagagcagttagtaaacactctgtttataaagtctgcaagtggatattcagacccctttgaggccttcgttggaaacgggatttcttcatattatgctagacagaagaattctcagtaacttccttgtgttgtgtgtgttcaactcacagagttgaactttcatttacccagagcagatttgaaacactctttttgtggaatttgcaagtggagatttcaagcgctttgaggccaaaggcagaaaaggaaatatcttcgtttcaaaactagacagaatcattctcagaaactgctcggcgatgtgtgcattcaactctgagagtttaacttttcttttcattcagcagtttcgaaacactctgtttgtaaagtctgcacgtggatattttgaccacttagaggccttcgttggaaacgggtttttttcatgtaaggctagacagaagaatttcctgtaagttccttgtgttgcgtgcattcaactcacagagttgaacgttcccttagacagagcagatttgaaacactctttttgtgcaattggcaagtggagatttcaagcgatttaaggtcaatggcagaaaacgatataccttcatttcaaaactagacagaaatcattcccacaaactgcgttgtgatgtgttcgttcaactcacagagtttaacctttctgttcatagagcagttaggaaacactctgtttgtaaagtctgtaagtggatattctgacatcttgtggcctttgttggaaacgggatttcttcatattctgctagacagaagaattctcagtaacttacttgtgttgtgtgtgttcaactcacagagttcaacgatcctttacacagagcagacttgaaacactctttttgtggaatttgcaagtggagatttcagccgctttgaggtcaatggtagaaaaggaaatatcttcgtataaaaactagacagaatgattctcagaaactcctttgtgatgtgtgcgttcaactcacagagtttaacctttcttttcatagagcagttgggaaacactctgtttgtaacgtctgcaagtggatattcagacatccttgaggctttcgttggaaacgggatttcttcatattctgctagaaagaagaattcccagtaacatccttgtgttgtgtgtgttcaactcacaaagttgaactttcatttacacagagcagatttgaaacactctttttgtggaatttgcaaatggagatttcaagcgctttgaggccaaaggcagaaaaggaaatatcttcgtataaaaactagacagaaatcattctcagaaactgctctgcgatgtgtgcgttcaactctcaggagtttaacttttcttttcattcagcagtttggaaacactctgtttgtaaagtctgcacgtggatattttgaccacttagaggccttcgttggaaacgggtttttttcctgtaaggctagacagaataattcccagtaacttccttgtgttgtgtacattcaactcacagagttgaacgttcccttagacagagcagatttgaaacactctttttgtgaaattggcaagtggagatttcaagcgctttaaggtcaatggcagaaaaggaaatatcttcgtttcaaaactagacagaatgattctcagaaactcctttgtgatgtgtgcgttcaactcacagagtttaacctttctgttcatagagcagttgggaaacactctgtttgtaaagtctgcaagtggatattcagacctctttgaggccttcgttggaaacgggatttcttcatattctgctagacagaagaattctcagtaacttcccttgtgttgtgtgtattcaactcacagagttgaatgatcctttacacagaacagacttgaaacactctttttgtggaatttgcaagtggagatttcagccgctttgaggtcaatggtagaataggaaatatcttcctatagaaactagacagaatgattctcagaaactcctttgtgatgtgtgcgttcaactcacagagtttaacctttgttttcatagagcagttaggaaacactctgtttgtaatgtctgcaagtggatattcagacatctttgaggctttcgttgtaaacgggatttcttcatattctgctatacagaagaattcccagtaacttcccttgtgttgtgtgtgttcaactcacagagttgaactttcatttacacagagcagatttgaaacactctttttgtggaatttgcaagtggagatttcaagggctttgaggccaaaggcagaaaaggaaatgtcttcgtttcaaaactagacagaatcattctcagaaactgctctgcgatgtgtgcgttcaactctcagagtttaacttttcttttcattcagcagtttggaaacactctggttgtaaagtctgcacgtggatattttgaccacttagaggccttcgttggaaacgggtttttttcctgtaaggctagacaaaagaattcccagtaacttcctcgtgttgtgtgcattcaactcacagagttgaacgttcccttagacagagcagatttgaaacactctatttgtgcaattggcaagtgtagatttcaagcgctttaaggtcaatggcagaaaaggaaatatcttcgtttcaaaactagacagaatcattcccacaaactgcgttgtgatgtgttcgttcaactcacagagtttaacctttccgttcatagagcagttaggaaacactctgtttgtaaagtctgaaagtggatattctgacatcttgtggccttcgttggaaacgggatttcttcatattctgctagacagaataattctcagtaacttctttgtgttgtgtttattcagctgacagagttgaacgatcctttacagagagcagacttgaaacactctttttgtggaatttgcaagtggagatttcagccgctttgaggtcaatggtagaataggaaatatcttcctatagaaactagacagaatgattctcagaaactcctttgtgatgtgtgcgttcaactcacagagtttaacctttcttttcatagagcagttaggaaacactctgtttgtaaagtctgcaagtggatattcagacctctttgaggccttcgttggaaaagggtttttttcatataaggctagacagaagaattctcagtaacttccttgtgttgtgtgtattcaactgacagagtttaactttcatttagagagagcagatttgaaaacctgtttttgtggaatttgcaagtggagatttcaagcgctttggggccaaaggcagaaaaggaaatatcttcgtataaaaactaaacggaattattctcagaaactcctttgtgatgtgtgcgttcaactcacagaatttaacctttcttttcatagagcagttaggaaacactctgtttgtaaagactgcaagtggatattcagacctctttgaggccttcgttggaaacgggtttttttcctgtaaggctagacagaagaattcccagtaacttccttgtgttgtgtacattcaactcacagagttgaacgttcccttagacagagcagatttgaaacactctttttgtgcaattggcaagtggagatttcaagcgctttaaggtcaatggcagaaaaggaaatatcttcgtttcaaaacaagacagaatcattcccacaaactgcgttgtgatgtgttcgttcaactcacagagtttaacctttcttttcatagagcagttaggaaacagtctgtttgtaaattttgtaagtggatattctgacatcttgtggccttcgttggaaacgggatttcttcatattctgctagacagaagaattctcagtaacttccttgtgttgtgtgtattcaactcacagagttgaaggatcctgtacacagagcagtcttgaaacactctttttgtggaatttgcaagtggagatttcagccgctttgaggtcaatagtagaaaaggaaatatcttcgtagaaaaactacacagaatgattctcagaaactcctttgtgatgtgtgcgttcaactcacagagtttaacctttcttttcatagagcagttaggaaacactctgtttgtaaggtctgcaagtggatattcagacatctttgaggctttcgttgcaaacgggttttcttcatattctgctacacagaagaattctcagaaacttccttgtgttgtgtgatttcaactcacagagttgaacgatgctttacacagagtagacttgaaacactctttttgtggaatttgcaagtggagatttcagccgctttgtggtcaatggttgaaaaggaaatatcttcgtataaaaactagacagaatgattctccgaaactcctttgtgatgtgtgcgtacaactcacagagtttaacctttcttttcatagagcagttaggaaacactctgtttgtaaagtctgcaagtggatattcagacctctttgaggccttcgttggaaacgggatttcttcatattctgctagacagaagaattcccagtaacttgccttgtgttgtgtacattcaactcacagagttgaacgttcccttagacagagcagatttgaaacactctttttgtgcaattggcaaatggagatttcaagcgctttaaggtcaatggcagaaaaggaaattgttcgtttcaaaactagacagaatcattcccacaaactgcgttgtgatgtgttcgttcaactcacagagtttaacatttctgttcatagagcagttaggaaacactctgtttgtaaagtctgtatgtggatattctgacatcttgtggccttcgttggaaacgggatttcttcatattctgctagacagaagaattctcagtaacatctttgtgttgtgtgtattcaactcacagagttgaacgatcctttacacagagcagacttgaaacactctttttgtggaatttgcaagtggagatttcagccgctttgaggtcaatggtagaataggaaatatcttcctatagaaactagacagaatgattctcagaaactcctttgtgatgtgtgcgttcaactcacagagtttaacctttcttttcatagagcagttaggaaacactctgtttctaaagtctgcaagtggatattcagccctctttgaggccttcgttggaaacgggtttttttcatataaggctagagagaagaattcccagtaacttccttgtgttgtgtgtgttcaactcacagagttgaactttcatttacacagagcagatttgaaacactctttttgtggaatttgcaagtggagatttcaagcgctttgaggccaaaggcagaaaaggaaatatcttcgtagaaaaactaggcagaaatcattctcagaaactgctctgcgatgtgtgcgttcaactctcaggagtttaacttttcttttcattcagcagtttggaaacactctgtttgtaaagtctgcacgtggatattttgaccacttagaggccttcgttggaaacgggtttttttcctgtaaggctagacagaagaattcccagtaacttccttgtgttgtgtacattcaactcacagagttgaacgttcccttagacagagcagatttgaaacactctttttgtgcaattggcaagtggagatttcaagcgctttaaggtcaatggcagaaaaggaaatatcttcgtttcaaaactagacagtatcattcccacaaactgcgttgtgatgtgttcgttcaactcacagagtttaacctttctgttcatagagcagttaggtaacactctgtttgtaaagtctgccagtggatattcggacctccttgaggccttcgttggaaacgggatttcttcatattctgctagacagaagagttctcagtaacttttttgtgttgtgtgtattcaactcacagagttgaaccttgctttagagagagcagatttgaaacactctttttgtggaatttgcaagtggagatttcagccgctttgagttcaatggtagaataggaaatatcttcctatagaaactagacagaatgattctcagaaactcctttgtgatgtgtgcgttcaactcacagagtttaacctttcttttcatagagcagttaggaaacactctgtttgtaaagtctgcaagtggatattcagacctctttgaggccttcgttggaaacgggatttcttcatattctgctagacacaagaattctcagaaacttccttgtgttgtgtgttttcaactcacagagttgaacgatcctttacacagagcagacttgaaacactctttttgtggaatttgcaagtggagatttcagccgctttgaggtcaatggtagaataggaaatattttcctatagaaactagacagaatgattctcagaaactcctttgtgatgtgtgcgttcaactcacagagtttaacctttcttttcatagagcagttaggaaacactctgtttgtaaagactgcaagtggatattcagacctccttgaggccttcgttggaaacaggatttcttcatattatgctagacagaagaattctcagtaacttccttgtgttgtgtgtattcaactcacagagttgaacaatcctttacacagagcagacttgaaacactctttttgtggaatttgcaagtggagatttcagccgctttgaggtcaatggtagaataggaaatatcttcctatagaaactagacagaatcattctcagaaactgctctgcgatgtgtgcgtacaactctcagactttaacttttcttttcattcagcagtttggaaacactctgtttgtaaagtctgcacgtggataatttgaccacttagaggccttcgttggaaacgggtttttttcatgtaaggctagacagaagaattcccagtaacttccttgtgttgtgtgcattcaactcacagagttgaacgtttccttagacagagcagaattgaaacactctatttgtgcaatttgcaagtgtagatttcaagcgctttaaggtcaatggcagaaaaggaaatatcttcgtttcaaaactagacagaatcattcccacaaactgcgttgtgatgtgttcgttcaactcacagagtttaacctttcttttcatagagcagttaggaaacagtctgtttgtcaattctgtaagtggatattctgacatcttgtggccttcgttggaaacggggtttcttcatattctcctagacagaagaattctcagtaacttccttgtgttgtgtgtattcaactcacagagttgaacgatcctttacacagagcagattagaaacacttcttttgtggaatttgcaagtggagatttcagccgcgttgaggtcaatggtagaaaaggaaatatcttcgtataaaaactagacagaatgattctgagaaactcctttgtgatgtgtgcgttcaactcacagagtttaacctttcttttcatagagcagttaggaaacactctgtttgtaaagtctgcaagtggatattcagatctccttgaggccttctttggaaacgggatttcttcatattatgctagacagaagaattcccagtaacttccttgtgttgtgtgtgtagaactcacagagttgaactttcatttagacagagcagatttgaaacactctttttgtggaatttgcaaatggagaattcatgcactttgaggccaaaggcagaaaaggaaatatcttcgtataaaaactagacagaatcattctcagaaactgcggcgtgatgtgtgcgttcaactctcagagtttaacttttcttttcattcagcggtttggaaacactctgtttgtaaagtctgcacgtggatattttgaccacttagaggccttcgttggaaacgggtttttttcatgtaaggctagacagaagaattcccagtaacttccttgtgttgtgtacattcaactcacagagttgaacgttcccttagacagagcagatttgaaacactctttttgtgcaatttgcaagtggtgatttcagccgctttgaggtcaatggtagaaaaggaaatatcttcgtataaaaactagacagaatcattcccacaaactgcgttgtgatgtgttcgttcaactcacagagtttaacctttcttttcatagagcagttaggaaacagtctgtttgtaaattctgtaagtggatattctgacatcttgtggcgttcgttggaaacgggatttcttcatattctgctagacagaagaattctcagtaacttccttgtgttgtgtgtattcaactcacagagttggacgatcctttacacagagcagacttgaaacactctttttgtggaatttgcaagtggagatttcagccgctttgaggtcaatagtagaaaaggaaatatcttcgtagaaaaactagacagaatgattctcagaaacttctttgtgatgtgtgtgttcaactcacagagtttaacctttcttttcatagagcagttagtaaacactctgtttataaagtctgcaagtggatattcagacccctttgaggccttcgttggaaacgggatttcttcatattatgctagacagaacaattcccagtaacttccttgggttgtgtgtgttcaactcacagagttgaactttcatttacacagagcagatttgaaacactctttttgtggaatttgcaagtggagatttcaagcgctttgaggccaaaggcagaaaaggaaatatcttcgtataaaaactagacagaatcattctcagaaactgctctgcgatgtgtgcgttcaactctcagagtttaacttttcttttcattcagcagtttggaaacactctgtttgtaaagtctgcacgtggataatttgacaacttagaggccttctttggaaacgggtttttttcatgtaaggctagacagaagaattcccagtaacttccttgtgttgtgtacattcaactcacagagttgaacgttcccttagacagagcagatttgaaacactctttttgtgcaattggcaagtggtgatttcagccgctttgaggtcaatggtagaaaaggaaatatcttcgtataaaaactagacagaatgattctcagaaacttctttgtgatgtgtgcgttcaactcacagagtttaacctttcttttcacagagcagttaggaaacactctgtttgtaaactctgcaagtggatattcagacctctttgaggccttcgttggtaacgggatttcttcatactatgctagacagaagaattctcagtaacttccttgtgttgtgtgtattcaactcacagagttgaacgatcctttacacagagcagacttgtaacactctttttgtggaatttgcaagtggagatttcagccgctttgaagtcaaaggtagaaaaggaaatatcttcctataaaaactagacagaatgattctcagaaacttcattgtgatgtgtgcgttcaactcacagagtttaacctttcttttcatagagcagttaggaaacaccgtttgtaaactctgcaagtggatattcagacctctttgaggccttcgttggaaacgggatttcttcatactgtgctagacagaagaattctcagtaacttctttgtgttgtgtgtattcaactgacagagttgaactttcatttagagagagcagatttgaaacactgtttttgtggaatttgcaagtggagatttcaagcgctttggggccaaaggcagaaaaggaaatatcttcgtataaaaactagacagaatcattctcagaaactgctgcgtgatgtgtgcgttcaactctcagagtttaacttttcttttcattcagcggtttggaaacactctgtttgtaaagtctgcacgtggatattttgaccacttagaggccttctttggaaacgggtttttttcaagtaaggctagacagaagaattcccagtaacttccttgtgttgtgtgcattcaactcacagatttgaacgttccctagacggagcagatttgaaacactctatttgtgcaatttgcaagtgtagatttcaagcgctttaaggtcaatggcagaaaagggaatatcttcgtttcaaaactagacagaatcattcccacaaactgcgttgtgatgtgttcgttcaactcacagagtttaacctttctgttcatagagcagtgaggaaacactctgtttgtaaagtctgtaagtgggtattctgacatcttgtggccttcgttggaaacgggatttcttcatattctgctagacagaagaattctgagtaacttccttgtgttgtgtgtattcaactcacagagttcaacgatcctttacacagagcagactagaaacacccttttgtggaatttgcaagtggagatttcagccgctttgaggtcaattgtagaaaaggaaatatcttcgtataaaaactagacagaatgattgtcagaaactcctttgtgctgtgtgcgttcaactcacagagtttaaactttcttttcatagagcagttaggaaacactctgtttgtaaagtctgcaggtggatattcagacatcattgaggctttcgttggaaacgggatttcttcatattctgctagacagaagaattctcagtaacttccttgtgttgtgtgtattcaactgacacagttgaactttcatttagagagagcagatttgaaacactgtttttgtggaatttgcaagtggagatttcaagcgctttggggccaaaggcagaaaaggaaatatcttcgtataaaaactagacagaatgattctcagaaactcctttgtgatgtgggcgttcaactcacagagtttaacctttcttttcatagagccgttaggaaacactctgtttgtaaattctgcacgtggatatttggacttcttagaggccttcgttggaaacgggtttttttcatgtaaggctagacggaagaattcccagtaacttccttgcgttgtgtacattcaactcacagagttgaacgttcccttagacagagcagatttgaaacactctttttgtgcaattggcaagtggagatttcaagcgctttaaggtcaatggcagaaaaggaaatatcttcgtttcaaaactagacagaatcactcccacaaactgcgttgtgatgtgttcgttcaactcacagagtttaacctttcttttcatagagcagttaggaaacagtctgtttgtaaattctgtaagtggatattctgacatcttgtggccttcgttggaaacgggatttcttcatattctgctagacagaagaattctcagtaacttccttgtgttgtgtgtattcaactcacagtagttgaacgatcctttacacagagcagacttgaaacactctttttgtggaatttgcaaggggagatttcagccgctttgagttcaatggtagaataggaaatatcttcctatagaaactagacagagtgattctcagaaacttctttgtgatgtctgcgttcaactcacagagtttaacctttcttttcatagagcagttaggaaacactctgtttgtaaagtctgcaagtggatagtcagacctccttgaggccttcgttggaaacgggatttcttcatattctgctatacagaagaattctcagtaacttccttgtgttgtttgtattcaactgacagagttgaactttcatttacagagagcagatttgaaacactgtttttgtggaatttgcaagtggagatttcaagcgctttttggccaaaggcagaaaacgaaatatcttcgtataaaaactagacagaatcattctcagaaactgctgcgtgatgtgtgcgttcaactctcagagtttaacttttcttttcattcagcggttctgaaacactctgtttgtaaagtctgcacgtggatattttgaccacttagaggccttcgttggaaacgggtttttttcatgtaaggctaggcagaagaattcccagtaacttccttgtgttgtgtgcattcaactcacagagttgaacgttccttagacagagcagatttgaaacactctatttgtgcaatttgcaagtgtagatttcaagcgctttaaggtcaatggcagaaaaggaaatatcttcgtttcaaaactagacagaatcattcccacaaactgcgttgtgatgtgttcgttcaactcacagtgtttaacctttccgttcatagagcagttaggaaacactctgtttgtaaagtctataagtggatattctgacatcttgtggccttcgttggaaacgggatttcttcatattctgctagacagaagaattctcagtaacttccttgtgttgtgtgtattcaactcacagagttgaacgatcctttacacagagcagacttgaaacactctttttgtggaatttgcaagtggagatttcagccgctgtgagttcaatggtagaataggaaatatcttcctatagaaactagacagaatgattctcagaaactcctttgtgatgtgtgtgttcaactcacagagtttaacctttcttttcatagagcagttaggaaacactctgtttgtaaagtctgcaagtggatattcagacctctttgaggccttcgttggaaacgggatttcttcatattctgctagacagaagaattcccagtaacttccttgtgttgtgtgtgttcaactcacagagttgaactttcatttacacagagcagatttgaaatactctttttgtggaatttgcaagtggagatttcaagcgctttgaggccaaaggcagaaaaggaaatatcttcgtataaaaactagacagaatcattctcagaaactgctctgcgatgtgtgcgttcaactctcagagtttaacttttcttttcattcagcagtttgtaaacactctgtttgtaaagtctgcacgtggatattttgaccacttagaggcctttgttggaaacgggtttttttcctgtaaggctagacagaagaattcccaggaacttccttgcgttgtgtacattcaactcacagagttgaacgttcccttagacagagcagatttgaaacactctttttgtgcaattggcaagtggagatttcaagcgctttaaggtcaatggcagaaaaggaaatatcttcgtttcaaaactagacagaatcattctcagaaactgctgcgtgatgtgtgcgttcaactctcagagtttaacttttcttttcattcagcggtttggaaacactctgtttgtaaagtctgtaagtggatattctgacatcttgtggccttcgttggaaacgggatttcttcatattctgctagacagaagaattctcagtaccttccttgttttgtgtgtattcaactcacagagttgaacgatcctttacgcagagcagacttgaaacactctttttgtggaatttgcaagtggagatttcagccgctttgaggtcaatggtagaaaaggaaatatcttcgtataaagactagacagaatgattctcagaaactcctttgtgatgtgtgcgtttaactcacagagtttaacctttcttttcatagagcagttaggaaacactctgtttgtaaagtctgcaagtggatattcagacatccttgaggctttcgttggaaacgggatttcttcatattctgccagaaagaagaattcccagtaacttccttgtgttgtgtgtgttcaactcacagagttgaactttcatttacacagagcagatttgaaacactctttttgtggaatttgcaagtggagatttcaagcgctttgaggccaaagcagaaaaggaaatatcttcgtttgaaaactagacagaatcattctcagaaactgctctgcgatgtgtgcgttcaactctcagagtttaacttttcttttcattcagcagtttggaaacactctgtttgtaaagtctgcacgtggataacttgaccacttagaggccttcgttggaaacgggtttttttcatgtaaggctagacagaagaattcccagtgacatccttgtgttgtgtgcattcaactcacagagttgaacgttcccttagacagagcagatttgaaacactctatttgtgcaatttgcaagtgtagatttcaagcgctttaacgtcaatggcagaaaaggaaatatcttcgttttaaaactagacagaatcattcccacaaactgcattgtgatgtgttcgttcaactcacagagtttaacctttctgttcatagagcagttaggaaacactctgtttgtaaagtctgcaagtggatattcagacctctttgaggccttcgttggaaacgggatttcttcatattctgctagacagaagaattctcagtaacttccttgtgttgtgtgtattcaactcacagagttgaaggatcctttacagagagcaggcttgaaacactctttttgtcgaatttgcaagtggagatttcagccgctttgaggtcaatggtagaatagggaatatcttcttatagaaactagacagaatgattctcagaaactcctttgtgatgtgtgtgttcaactcacagagtttaacctttcttttcatagagcagttagtaaacactctgtttataaagtctgcaagtggatattcagacccctttgaggccttcgttggaaatgggatttcttcatattatgctagacagaagaattctcagtaactttccttgtgttgtgtgtattcaactgacagagttgaactttcatttagagagagcagatttgaaacactctttttgtggaatttgcaagtggagatttcaagcgctttggggccaaaggcagaaaaggaaatatcttcgtataaaaactagacagaatcattctcagaaactgctctgtgatgtgtgcgttcaactctcagagtttaacttttcttttcattcagcagtttggaaacaatctgtttgtaaagtctgcacgtggatattttgaccacttagaggccttcgttggaaacgggtttctttcctgtaagggtagacagaagaattcccagtaacttccttgtgttgtgtgcattcaactcacagagttgaacgttcccttagacagagcagatttgaaacactctatttgtgcaatttgcaagtgtagttttcaagctctttaaggtcaacggcagaaaaggaaatatcttggtttcaaaactagacagaatcattcccacaaactgcgttgtgatgtgttcgttcaactcacagagtttaacctttctgttcatagagcagttaggaaacaatctgtttgtaaagtctgcaagtggatattcagacctccttgaggccttcgttggaaacgggatttcatcatattatgctagacagaagaattctcagtaacttccttgtgttgtgtgaattcacctcacagagttgaacgatcgtttacacagagcagacttgaaacactctttttgtggaatttgcaagtggagatttcagccgctttgtggtcaatagtagaataggaaatatcttcctatagaaactagacagaatgattctcagaaagtcctttgtgatgtgtgcgttcaactcacagagtttaacctttctgttcatagagcagttaggaaacactctgtttgtaaagtctgcaagtggatattcagacctccttgaggccttcgttggaaacgggatttcttcatattctgctagacagaagaattcccagtaacttccttgtgttgtgtgtgttcaactcacagagttgaactttcatttacacagagcagatttgaaacactctttctgtggaatttgcaagtggagatttcaagcgctttgaggccaaaggcagaaaaggaaatatcttcgtttcaaaactagacagaatcattctcagaaactgctctgcgatgtgtgcgttcaactctcagagtttaacttttcttttcattcagcagtttggaaacactctgtttgtaaagtctgcacgtggatattttgaccatttagagaccttcgttggaaacgggtttttttcttgtaaggctagacagaagaattcccagtaacttccttgtgttgtgtacattcaactcacagagttgaacgttcccttagacagagcagatttgaaacactctttttgtgcaattggcaaatggagatttccagcgctttaaggtcaatggcagaaaaggaaatatcttcgtttcaaaactagacagaaaatcattcccacaaactgcgttgtgatgtgttcgttcaactcacagagtttaacctttctgttcatagagcagttaggaaacactctgtttgtaaagtctgtaagtggatattctgacatcttgtggccttcgttggaaacgggatttcttcatattctgctagacagaagaattcccagtaacttcccttgtgttgtgtgtgttcaactcacagagttgaactttcatttacacagagcagatttgaaacactctttttgtggaatttgcaaatggagatttcagccgcgttgaggccaatggtagaaaaggaaatatcttcgtttcaaaactagacagaatgattctcagaaactcctttgtgatgtgtgtgttcaactcacagattttaacctttcttttcatagagcagttaggaaacactctgtttgtaaagtctgcaagtggatattcagacctctttgaggccttcgttggaaacgggtttttttcatataaggctagacagaagaattctcagtaacttccttgtgttgtgtgtattcaactcacagaattgaacgatcctttacacagagcagacttgaaacactctttttgtggaatttgcatgtggagatttcagccgctttgaggtcaatggtagaaaaggaaatatcttcctatagaaactagacagaatgattctgagaaactcctttgtgatgtgtgcgttcaactcacagagtttaacctttcttttcacagagcagttaggaaacactctgtttgtaaagtctgcaagtggatattcagacctccttgaggccttcgttggaaacgggatttcttcatattatgctagacagaagaattcccagtaacttctttgtgttgtgtgcattcaactcacagagttgaacgttcccttagacagagcagattggaaacactctatttgtgcaatttgcaagtgtagatttcaagcgctttaaggtcaacggcagaaaaggaaatatcttcgtttcaaaactagacagaatcattcccacaaactgcgttgtgatgtgttcgttcaactcacacagtttaacctttctgttcatagagcagttaggaaacactctgtttgtaaagtctctaagtggatactctgacatcttgtggccttcgttggaaacgggatttcttcatattctgctagacagaagaattctcagaaacttccttgtgttgtgtgttttcaactcacagagttgaatgatcctttacacagagtagacttgaaacactctttttgtggaatttgcaagtggagatttcagccgctttgaagtcaatggtagaaaaggaaatatcttcgtataaaaactagacagaatgattctcagaaactcctttgtgatgtgtgcgttcaactcacagagtttaacctttcttttcttagagcagttaggaaacactctgtttgtaaagtctgcaagtggatattcagacctctttgaggccttcgttggaaacgggtttttttcatataaggctagacagaagaattctcagtaacttccttgtgttatgtgtattcaactgacagagttgaactttcatttagagagagcagatttgaaacactgtttttgtggaatttgcaagtggagatttcaagcgctttggggccaaaggcagaaaaggaaatatcttcgtatgaaaactagacacaatcattctcagaaactgctctgcgatgtgtgcgttcaactctcagagtttaacttttcttttcattcagcagtgtggaaacactctgtttgtaaagtctgcacgtggatattttgaccacttagaggccttcgttggaaacgggtttttttcctgtcaggctagacagaagaattcccagtaacttccttgtgttgtgtgcattcaactcacagagttgaacgttcccttagacagagcagatttgaaacactctatttgtgcaatttgcaagtgtagatttgaagcgctttcaggtcaatggcagaaaaggaaatatcttcgtttcaaaactagacagaatgattcccacaaactgcgttgtgatgtgttcgttcaactcacagagtttaacctttctgttcatagagcagttaggaaacactctgtttgtaaagtctgtaagtggatattctgacatcttgtggccttcgttggaaacgggatttcttcatattctgctagacagaagaattctcagtaacttaccttgtgttgtgtttattcaactcacagagttgaatgatcctttacacagagcagacttgaaacactctttttgtggaatttgcaagtggagatttcagccgctttgaagtcaatggtagaaaagtaaatatcttcgtataaagacaagacagaatgattttcagaaactgctttgtgatgtgtgcgttcaactcacagagtttcaactttcttttcatagagcagttaggaaacactctgtttgtaaagtctacaagtggatattcagacctctttgaggccttcgttggaaacgggatttctttatattatgctagacagaagaattcccagtaacttccttgtgttgtgtgtgttcaactcacagagttgaactttcatttacacagagcagatttgaaacactctttttgtggaatttgcaagtggagatttcaagcgctttgaggccaaaggcagaaaaggaaatatcttcgtataaaaagtagacagaatcattctcagaaactgctctgcgatgtgtgcgttcaactctcagagtttaacttttcttttcattcagcagtttggaaacagtctgtttgtaaagtctgcacgtggatattttgaccacttagaggccttcgttggaaacggttttctttcctgtaaggctatacagaagaattcccagtaacttccttgtgttgtgtgcattcaactcacagagttgaacgttcccttaaacagagcagatttgaaacactctttttgtgcaattggcaagtggagatttcaagcgctttaaggtcaatggcagaaaaggaaatatcttcgtttcaaaactagacagaatcattcccacaaactgcgttgtgatgtgttcgttcaactcacagagtttaacatttcttttcatagagcagttaggaaacagtctgtttgtaaattctgtaagtggatattctgacatcttgtggccttcgttggaaacgggatatcttcacattctgctagacagaagaattctcagtaacttccttgtgttgtgtgtattcaactcagagagttgaacgatcctttacacagagcagacttgtaacactctttttgtggaatttgcaagtggagatttcagccgctttgaagtcaaaggtagaaaaggaaatatcttcctataaaaactagacagaatgattctcagaaactcctttgtgatgtgtgtgttcaactcacagagtttaaccattcttttcatagagcagttagtaaacactcagtttataaagtctgcaaatggatattcagacccctttgaggccttcgttggaaacgggatttcttcatattatgctagaaagaagaattcccagtaacttccttgtgttgtgtgtgttcaactcacagagttgaactttcatttacacagagcagatttgaaacactctttgtggaatttgcaagtggagatttcaagcgctttgaggccaaaggcagaaaaggaaatatcttcgtataaaaactagacagaatgattctcagaaacttcattgtgatgtgtgcgttcaactcacagagtttaacctttcttttcatagagcagttaggaaacactctgtttgtaaactctgcaagtggatattcagacctcctttgaggccttcgttggaaacgggatttcttcatactgtgctagacagaagaattcgcagtaacttccttgtgttgtgtgtattcaactgacagagttgaacttacatttagacagagcagattagaaaaactctttatgtggaattttcaagtggagatttcaagcgcgttgaggccaaaggcagaaaaggaaatatcttcgtataaaaactagacagaatcattccctcaaactgcgttgtgatgtgttcgatcaactcacggagtttaacctttcttttcatacagcagttaggaaacactctgtttgtaaagtctgtaagtggatatgctgacatcttgtggccttcgttggaaacgagatgtcttcatattctgctagacagaagaattctcagaatcttccttgtgttgtgtgtattcaactcacagagttgaacgatccctttacacagagcagacttgaaacactctttttgtggaatttgcaagtggagatttcagccgctttgaggtccatggtagaaaaggaaatatcttcgtataaaaactagacagaatgattctcagaaactcctttgtgatgtgtgcgttcaactcacagagtttaacctttcttttcatagagcagttaggaaacactctgtttgtaaagtctgcaagtggatattcagacatctttgaggccttcgttggaaacgggatttcttcatgttctgctagacacaagaattctcagtatcttccttgtgttgtgtgtgttcaactcacagagttgaactttgatttacacagagcagatttgaaacactctttttgtggaatttgcaagtggagatttcaagcgctttgaggccaaaggcagaaaaggaaatatcttcgtctaaaaactagacagaatcattctcagaaactgctctgcgatgtgtgcgttcaactctcagagtttaacttttcttttcattcagcagtttggaaacactctgtttgtaaagtctgcacgtggataatttgaccacttagaggccttctttggaaaagggtttttttcatataaggctagacagaagaattcccagtaacttccttgtgttgtggacattcaactcacagagttgaacgttcccttagacagaacagatttgaaacactctttttgagcaattggcaagtggtgatttcagccgctttgaggtcaatggtagaaaaggaaatatcttcgtataaaaactagacagaatcattcccacaaactgcgttgtgatgtgttcgttcaactcacagagtttaacctttcttttcatagagtagttaggaaacagtctgtttgaaaattctgtaagtagatattctgacagcttgtggccttcgttggaaacgggatttctttatattctgctagacagaataattctcagtaacttccttgtgttgtgtgtattcaactcacagagttgaaggatcctttacagagagcaggcttgaaacactctttttgtcgaatttgcaagtggagatttcagccgctttgtggtcaatggtagaataggaaatatcttcttatagaaactagacagaatgattctcataaactcctttgtgatgtgtgcgttcaactcacagagtttaacttttcttttcacagagcagttaggaaacactctgtttgtaaagtctgcaagtggatattcagacctctttggggccttcgttggaaacgggatttcttcatattctgctagacagaataattctcagtaacttccttgtgttgtgtgtattcaactcacagagttgaacgatcctttacacagagcggacttgaaacattctttttgtggaatttgcaagtggagatttcagccgctttgaggtcaatggtagaataggaaatatcttcctatagaaactagacagaatcattctcagaaactgctctgcgatgtgtgcgttcaactctcagagtttaacatttcttttcattcagcagtttggaaacactctgtttgtaaagtctgcacgtggatattttgaccacttagaggccttcgttggaaacgggtttttttcctgtaaggctagacagaagcattcccagtaacttccttgtgttgtgtgcattcaactcacagagatgaacgttcccttagacagagcagatttgaaacgctctatttgcgcaatttgcaagtgtagatttcaagcgctttaaggtcaatggcagaaaaggaaatatcttcgtttcaaaactagacagaatgattctcagaaactcctttgtgatgtgtgcgttcaactcacagagtttaacctttcttttcatagagcagttgggaaacactctgtttgtaaagtctgcaagtggatattcagacatccttgaggctttctttggaaaagggatttcttcatattctgctagaaagaagaattctcagtaacttccttgtgttgtgtgtattcaactcacagagttgaacgatcctttacacagagcggacttgaaacacactttttgtggaatttgcaagtggagatttcagccgcgttgaggtcaatggtagaaaaggaaatatcttcgtataagaactagacagaatgattctcagaaactcctttgtgatgtgtgcgttcaactcacagagtttaacctttcttttcatagagcagttaggaaacactctgtttgtaaagtctgcaagtggatattcagacctccttgaggccttcgttggaaacggttttttttcatataaggctagacagaagaattcccagtaacttccttgtgttgtgtgtgttcaactcacagagttgaactttcatttacacagagcagatttgagacactctttttgtggaatttgctaatggagatttcaagcgctttgaggccaaaggctgaaaaggaaatatcttcgtataaaaactagacagaatcattctcagaaactgctgcgtgatgagtgcgttcaactctcagagtttaacttttcttttcattcagcggtttggaaacactctgtttgtaaagtctgcacgtggataatttgaccacttagaggccttcgttggaaacgggattttttcatgtaaggctagacagaagaattcccagtaacttccttgtgttgtgtgcattcaactcacagatttgaacgttcccttagacagagcagatttgaaacactctatttgtgcaattggcaagtgcagatttcaagcgctttaaggtcaatggcagaaaaggaaatatcttcgtttcaaaactagacagaatcattcccacaaactgcgttgtgatgtgttcgctcaactcacagagtttaacctttttcttcatagagcagttaggaaacactctgtttgtaaagtctgtaagtggatattctgtcatcttttggccttcgttggaaacgggatttcttcatattctgctagacagaagaattctcagaatcttccttgtgttgtgtgtattcaactcacagagttgaacgatcctttacacacagcagacttgaaacactctttttgtggaatttgcaagtggagatttcagccgctttgaggtccatggtagaaaaggaaatatcttcgtataaaaactagacagaatgattctcagaaagtcctttgtgatgtgtgttttcaactcacagagtttaacctttcttttcatagagcagttagtaaacactctgtttataaagtctgcaagtggatattcagacccctttgaggccttcgttggaaacgggatttcttcatattatgctagacagaagaattctcagtaacttccttgtgttgtgtgtattcaactgacagagttgaactttcatttagggagagcagatttgaaacactgtttttgtggaatttgcaagtggagatttcaagcgctttggggccaaaggcagaaaaggaaatatcttcgtagaaaaactagacagaatcattctcagaaactgctctgtgatgtgtgcgttcaactctcagagtttaacttttcttttcattcagcagtttggaaacactctgtttgtaaagtctgcacgtggatattttgaccacttagaggccttcgttggaaacgggtttttttcatgtaaggatagacagaagaattcccagtaacttccttgtgttgtgtacattcaactcacagagttgaacgttcccttagacagagcagatttgaaacactctttttgtgcaattggcaactggagatttcaagcgctttaaggtcaatggcagaaaaggaaatatcttcgtttcaaaactagacagaatcattctcagaaactgctctgcgatgtgtgcgttcaactctcagagtttaacttttcttttcattcagcagtttggaaacactctgtttgtaatgtctgcacgtggatattttgaccacttagaggccttcgttggaaacgggtttctttcctgtaaggctagacagaagaattcccagtaacttccttgtgttgtgtgcattcaactcacagagttgaacgttcccttagacagagcagatttgaaacactctatttgtgcaatttgcaagtgtagatttcaagcgctttaaggtcaatggcagaaaaggaaatatcttcgtataaaaactagacaggatgattctcataaactcctttgtgatgtgtgcggtcaactcacagagtttaacctttcttttcatagagcagttaggaaacactctgtttgtaaagtctgcaagaggatattcagacctctttgaggctttctttggaaacgggatttcttcatattctgctagacagaagaattctcagtaacttccttgtgttgtgtgtattcaactgacagagttgaactttcatttagagagagcagatttgaaacactgtttttgtggaatttgcaattggagatttcaagagctttggggccaaatgcagaaaaggaaatatcttcgtataaacactagacagaatcattctcagaaactgctctgcgatgtgtacgttcaactctcagagtttaacttttcttttcattcagcagtttggaaacactctgtttgtaaagtctgcacgtggatattttgaccacttagaggccttcgttggaaacgggtttttttcctgtaaggctagacagaagaattcccactaacttccttgtgttgtgtacattcaactcacagagttgaacgttcccttagacagagcagattggaaacactctttttgtgcaattggcaaatggagatttcaagcgctttaaggtcaatggcagaaaaggaaatatcttcgtttcaaaactagacagaatcattcccagaaactgcgttgtgatgtgttcgttcaactcacagagtttaacctttcttttcatagagcagttaggaaacagtctgtttgtcaattctgtaagtggatattctgacatcttgtggccttccttggaaacgggatttcttcatattctgctagacagaagaattctcagtaacttccttgtgttgtgtgtattcaactcacagagttgaaggatcctttacagagagcaggcttgaaacactctttttgtcgaatttgcaagtggagatttcagccgctttgaggtcaatggtagaataggaaatatcttcttatagaaaatagacagaatgattctcataaactcctttgtgatgtgtgcgttcaactcacagagtttaacctttcttttcatagagcagttaggaaacactctgtttctaaagtctgcaagtggatattcagacctccttgaggccttcgttggaaacgggatttcttcatattctgctagacagaagaattctcagtaacttccttgggttgtgtgtattcaactcacagagttgaacgatcctttacacagagcagacttgtaacactctttttgtggaatttgcaagtggagatttcagccgctttgaagtcaaaggtagaaaaggaaatatcttcctataaaaactagacagaatgattctcagaaactcctttgtgatgtgtgcgttcaactcacagagtttaacctttcttttcatagagcagttaggaaacgctctgtttgtaaagtctgcaagtggatattcagacatctttgaggctttcgttagaaacgggatttcttcatattctgctagacagaagaattctcagtaacttccttgtgttgtgtgtattcaactgacagagttgaactttcatttagagagagcagatttgaaacactgtttttgtggaatttgcaagtggagatttcaagagctttggggccaaaggcagaaaaggaaatatcttcgtataaaaactagacagaatcattctcagaaactactctgcgatgtgtgcgttcaactctcagagtttaacttttcttttcattcagcagtttggaaacactctgtttgtaaagtctgcacgtggataatttgaccacttagaggccttcgttggaaacgggtttttttcatgtaaggctagacagaagaattcccagtaacttccttgtgttgtgtacattcaactcacagagttgaacgttcccttagacagagcagatttgaaacactctttttgtgcaattggcaagtggacatttcaagcgctttgaggtcaatggcagaaaaggaaatatcttcgtttcaaaactagacagaatcattcccacaaactgcgttgtgatgtgttcgttcaactcacagagtttaacctttctgttcatagagcagttaggaaacactctgtttgtaaagtctgtaagtggagattctgacatcttgtggccttcgttggaaacgggatttcttcatattctgctagacagaagaattctcagtaacttccttgtgttgtgtgtattcaactctcagagttgaacgatcctttactgagagcagacttgaaacacactttttgtgcaatttgcaagtggagatttcagccgctttgaggtcaatggtagaataggaaatatcttcctatagaaactagacagaatgattctcagaaactcctttgtgatgtgtgcgttcaactcacagagtttaacctttcttttcatagagcggttaggaaacactctgtttgtaaagtctgcaagtggatattcagacctctttgaggccttcgttggaaacgggatttcttcatattctgctagagagaagaattctcagtaacttccttgtgttgtgtgtattcaactgacagagttgaactttcatttagagagagcagatttgaaacactgtttttgtggaatttgcaagtggagatttcaagcgctttgtgtccaaaggcagaaaacgaaatatcttcgtataaaaactagacagaatcattctcagaaactgctgcgtgatgtgtgcgttcaactctcagagtttaacttttcttttcattcagcggtttggaaacactctgtctgtaaagtctgcacgtggatattttgaccacttagaggccttcgttggaaacgtgttttttgcatgtaaggctagacagaagaattcccagtaacttcattgtgttgtgtgcattcaactcacagagttgaacgttcccttagacagagcagatttgaaacactctatttgtgcaatttgcaagtgtagatttcaagcgctttaaggtcaatggcagaaaaggaaatatcttcgtttcaaaactagacagaatcattcccacaaactgcgttgtgatgtgttcgttcaactcacagagtttaacctttctgttcatagagcagttaggaaacactctgtttgtaaagtctgtaagtggatattctgacatcttgtggccttcgttggaaacgggatttcttcatattatgctacacagaataattctcagtaacttccttgtgttctgtgtattcaactcacagagttgaacgatcctttacagagagcagacttgaaacactctttttgtggaatttgcaagtggagatttcagccgctttgaggtcaatggtagaaaaggaaatatcttcgtataaagactagacagaatgattctcagaatctcctttgtaatgtgtgcgttcaactcacagagtttaacctttcttttcatagagcagttaggaaacactctgtttgtaaagtctgcaagtggatattcagacctctttgaggccttcgttggaaacgggatttcttcatattctgctagacagaagaattcccagtaacttccttgtgttgtgtgtgttctacccccagagttgaactttgatttacacagagcagatttgaaacactctttttgtggaatttgcaagtggagatttcaagcgctttgaggccaaaggcagaaaaggaaatatcttcgtataaaaactagacagaatcattctcagaaactgctctgcgatgtgtgcgttcaactctcagagtttaactttgcttttcattcagcagtttggaaacactctgtttgtaaagtctgctcgtggataatttgaccatttagaggccttcgttggaaacgggtttttttcatgtaaggctagacagaagaattcccagtaacttccttgtgttctgtacattcaactcacagagttgaacgttcccttagacagagcagatttgaaacactctttttgtgcaattggcaaatggagatttcaagcgctttaaggtcaatggcagaaaaggaaatatcttcgtttcaaaactagacagaatcattcccacaaactgcgttgtgatgtgttcgtttaactcacagagtttaacctttcttttcatagagcagttaggaaacactctgttggtaaattctgtaagtggatattctgacatcttgtggccttcgttggaaacgggatttcttcatattctgctagatagaagaattctcagaaacgtccttgtgttgtgtgtattcaactcacagagttgaacgatcctttacacagagcagacttgaaacactctttttgtggaatttgcaagtggagatttcagccgctttgaggtcaatggtagaaaaggaaatatcttcgtatagaaacaagacagaatgattctcagaaactcctttgtgatgtgtgcgttcaactcacagagtttaacctttcttttcatagagcagttaggaaacactctgtttgtaaagtctgcaagtggatattcagacatctttgaggccttcgttggaaacgggatttcttcatattatgctagacagaagaattcccagtaacttccttgtgttgtgtgtgttcaactcatagagttgaactttcatttacacagagcagatttgaaacactctttttgtggaatttgcaaatggagatttcagccgcgttgaggtcaatggtagaaaaggaaatatcttcgtttcaaaactagacagaatcattctcagaaactgctctgcgatgtgtgcgttcaactctcagagtttaacttttcttttcattcagcagtttggaaacactctgtttgtaaagtctgcacgtggataacttgaccacttagaggccttcgttggaaacgggtttttttcatgtaaggctagacagaagaattcccagtaacttccttgtgttgtgtgcgttcaactcacagagttgaacgttcccttagacagagcagatttgaaacactctatttgtgcaatttgcaagtgtagttttcaagctctttaaggtcaacggcagaaaaggaaatatcttcgtttcaaaactagacagaatgattctcagaaactcctttgtgatgtgtgcgttcaactcacagagttttacctttctattcatagagcagttaggaaacactctgtttgtaaagtctgcaagtggatattcagacctccttgaggccttcgttggaaacgggatttcttcatattctgctagacagaagaattctcagtaacttccttgtgttgtgtttattcaactcacagagttgaaggatcctttacacagagcagacttgaaacactctttttgtggaatttgcaagtggagatttcagccgctttgaggtcaatggtagaaaagtaaatatcttcgtataaagactagacagaatgattctcagaaactcctttgtgatgtgtgcgttcaactcacagagtttaacctttcttttcatagagcagttaggaaacactctgtttgtaaagtctgcaagtggatattcacacctccttgaggccttcgttggaaacgggatttcttcatattctgctagacagaagaattctcagtaacttccttgtgttgtgtgtattcaactgacagagttgaactttcatttagagagagcagatttgaaacactgtttttgtggaatttgcaagtggagatttcaagcgctttggggccaaaggcagaaaagggaatatcttcgtataaaaactagacagaatcattctcagaaactgctgcgtgatgtatgcgttcaactctcagagtttaacttttcttttcattgagcggtttggaaacactgtgtttgtaaagtctgcacgtggatattttgaccacttagaggccttcgttggaaacggaattttttttgtaaggctagacagaagaattcccagtaacttccttgtgttgtgtacattcaactcacagagttgaacgttcccttagacagagcagacttgtaacactctttttgtggaatttgcaagtggagatttcagccgctttgaagtgaaaggtagaaaaggaaatatcttcctataaaaactagacagaatcattcccacaaactgcgttgtgatgtgttcgttcaactcacagagtttaacctttctgttcatagagcagttaggaaacactctgtttgtaaagtctgtaagtggatattctgacatcttgtggccttcgttggcaacgggatttcttcatattctgctagacagaagaattctcagtaacttccttgtgttgtgtgtattcaactcacagagttgaacgatcctttacacagagcagacttgtaacactctttttgtggaatttgcaagtggagatttcagccgctttgaggtccatggtagaaaaggaaatatcttcgtataaaaactagacagaatgattctcagaaactcctttgtgatgtgtgcgttcaactcacacagtttaacctttcttttcatagagcagttgggaaacactctgtttgtaaagtctgcaagtggatattcagacctccttgaggccttctttggaaacgggatttcttcatattatgctagacagaagaattctcagtaacttccttgtgttgtgtgtattcaactcacagagttgaacgatcctttacacagagcagacttgaaacactctttttgtggaatttgcaagtggatatttcagccgctttgaagtcaatggtagaataggaaatatcttcctatagaaactagacagaatcattctcagaaactgctctgcgatgtgtgcgttcaactctcagagtttaacttttcttttcattcagcagtttggaaacactctgtttgtaaagtctgcacgtggatattttgaccacttagtggccttcgttggaaacgggtttttttcctgtaaggctagacagaagaattcccagtaacttccttgtgttgtgtgcattcaactcacagagttgaacgttcccttagacagagcagatttgaaacactctatttgtgcaatttgcaagtgtagatttcaagcgctttaaagtcaatggcagaaaaggaaatatctttgtttcaaaactagacagaatcattcccacaaactgcgttgtgatgtgttcgttcaactcacagagtttaacctttcttttcatagagcagttaggaaacagtctgtttgaaaattctgtaaggggatattctgacatcttgtggccttcgttggaaacgggatttcttcatattctgctagacagaagaattctcagtaacttccttgtgttgtgtgtattcaactcacagagttgaacgatcctttacacagagcagacttgaaacactctttttgtggaatttgcaagtggagatttcagccgctttgaggtccatggtagaaaaggaaatatcttcgtataaagactagacagatagattctcagaaactcctttgtgatgtgtgcgttcaactcacagagtttaacctttcttttcatagagcagttaggaaacactctgtttgtaaagtctgcaagtgtatattcagacctctttgaggccttcgttggaaacgggtttctttcatataaggctagacagaaggattcccagtaacttccttgtgttgtgtgtgttcaactcacagagttgaactttcatttacaaagagcagatttgaaacactcttttagtggaatttgcaattggagatttcaagcgctttgaggccaaaggcagaaaaggaaatatcttcgtataaaaactagacagaatcattctcagaaactgctctgcgatgtgtgcgttcaactctcagactttaacttttcttttcattcagcagtttggaaacactctgtttgtaaagtctgcacgtggataatttgaccgcttggaggccttcgttggaaacgggtttttttcctgtaaggctagacagaagaattcccagtaacttccttgtgttgtgtgcattcaactcacagagttgaacgttcccttacacagagcagatttgaaacactctgtgcaatttccaagtgtagatttcaagcgctttaaggtcaacggcagaaaaggaaatatcttcgtttcaaaactagacagaatcattcccacaaactgcgttgtgatgtgttcgctcaactcacagagtttaacctttctgttcatagagcagttaggaaacactctgtttgtaaagtctgtaagtggatattctgacatcttgtggccttcgttggaaacgggatttcttcatattctgctagacagaagaattctcagtaacttccttgtgttgtgtgtattcaactcacagagttgaacgatcctttacacagagcagacttgaaacactctttttgtggaatttgcaagtggagatatcagccgctttgaggtcaatggtagaataggaaatatcttcctatagaaactagacagaatgattctcagaaactcctttgtgatgtgtgcgttcaactcacatagtttaacttttcttttcatagagcagttaggaaacactctgtttgtaaagtctgcaagtggatattcagacctctttgaggccttcgttggaaacgggatttcttcatattatgctagacagaagaattcccagtaacatccttgtgttgtgtgtgttcaactcacagagttgaactttcatttacacagagcagatttgaaacactctttttgtggaatttgcaaatggagatttcaagcgctttgaggccaaaggcagaaaaggaaatatcttcgtaaaaaaactagacagaatcattctcagaaactgctctgcgatgcgtgcgttcaactctcagagtttaacttttcttttcattcagcagtttggaaacactctgtttgtaaagtctgcacgtggataatttgaccacttagaggcctttgttggaaacgggtttttttcctgtaaggctagacagaagaattcccagtaacttccttgtgttgtgtacattcaactcacagagttgaacgttcccttagacagagcagatttgaaacactctttttgtgcaattggcaagtggagatttcaagcgctttatggtcaatggcagaaaaggaaatatcttcgtttcaaaactagagagaatgattctcagaaacttctttgtgatgtgtgcgttcacctcacagagtttaacctttcttttcatagagcagttaggaaacactttgtttgtaaagtctgcaagtggatattcagacctgtttgaggccttcgttggaaacgggatttcttcatactatgctagacagaagaattctcagtaacttccttgtgttgtgtgtattcagctcacagggttgaacgatcctttatacagagcagacttgaaacactctttttgtgggacttgcaagtggagatttcagccgctttgaggtcaataatagaaaaggaaatatcttcgtagaaaaactagacagaatgattctcagaaactcctttgagatgtgtgtgttctactcacagagtttaacctttcttttcatagagcagttaggaatcactctgtttgtaaagtctgcaagtggatattcagacctctttgaggccttcgttggaaacgggtttttttcatataaggctagacagaagaattctcagtaacttccttgtgttgtgtgtattcaagtgacagaggtgaactttcatttagagagagcagatttgaaacactgtttttgtggaatttgcaagtggagatttcaagcgctttggggccaaaggcagaaaaggaaatatcttcgtataaaaactagacagaatcattctcagaaactgctctgtgatgtgtgcgttcaactctcagagtttaacttttcttttcattcagcagtttggaaacactctgtttgtaaagtctgcacgtggatattttgaccacttagaggccttcgttagaaacgggtttttttcatgtaaggctagacagaagaattcccagtaacttccttgtgttgtgtgcattcaactcacagagttgaaccgttcccttagacagagcagatttgaaacactctatttgtgcaatttgcaagtgtagttttcaagctctttaaggtcaacggcagaaaaggaaatatcttcgtttcaaaactagacagaatcattcccacaaactgcgttgtgatgtgttcgttcaactcacagagtttaacctttcttttcatagagcagttaggaaacactctgttggtaaattctgtaagtggatattctgacatcttgtggcctccgttggaaacgggatttcttcatattctgctagacagaagaattctcagaaacttccttgtgttctgtttatttaactcacagagtcgaacgatcctttactcagagcagacttgaaacactccatttgtggaatttgcaagtggagatttcagccgctttgaggtcaatggtagaataggaaatatcttcctatggaaactagacagaatgattctcagaaactcctttgtgctgtgtgcgttcagctcacagagtttaacctttcttttcatagagcagttaggaaacactctgtttgtaaagtctgcaagtggatattcagacatctttgaggctttcgttggaaacgggatttcttcatattctgctagacagaagaattctcagaaacttccttgtgttgtgtgttttcaactcacagagttcaacgatccattacacagagaagacttgaaacactctttttgtggaattggcaagtggagatttcagccgctttgaggtcaatggtagaaaaggaaatatcttcgtataaaaactagacagaatcattctcagaaactgctctgcgatgtgtgcgttcaactctcagagtttaacttttcttttcattcagcagtttggaaacactctgtttgtaaagtctgcacgtagatattttgaccacttagaggccttcgttggaaacgggtttttttcctgtaaggctagacagaagaattcccagtaacttccttgtgttgtgtacattcaactcacagatttgaacgttcccttagacagagcagatttgaaacactctttttgtgcaattggcaagtggagatttcaagagttttaaggtcaatggccgaaaaggaaatatcttcgtttcaaaactagacagaatcattcccacaaactgcgttgtgatgtgttcgttcaaatcacagagtttaacctttcttttcatagagcagttaggaaacactctgtttgtaaattctgtaagtggatattctgacatcttgtggccttctttggaaacgggatttcttcatattctgctagacagaagaattctcagtaacttccttgtgttgtgtgtattcaactcacagagttgaacgatcctttacacagagcagacttgaaacactctttttgtggaatttgcaagtggagatttcagccgctttgaggtcaatggtagaaaaggaaactatcttcatataaagacaagacagaatgattctcagaaactcctttttgctgtgtgcgttcagctcacagagtttaacctttcttttcatagagcagttaggaaacactctgtttgtaaagtctgcaagtggatattcagacatctttgaggcttttgttggaaacgggatttcttcatattctgctagacagaagaattcccagtaacttccttgtgttgtgtgtgttcgactcacagatttgaactttcatttacacagagcagatttgaaacactctttttgtgggatttgcaaatggagatttcaagcgctttgaggccaaaggcagaaaaggaaatatcttcgtataaaaactagacagaatcattctcagaaactgctctgcgatgtgtgcgttcaactctcagagtttaacttttcttttcattcagcagtttggaaacactctgtttgtaaagtctgcacgtggataacttgaccacttagaggccttcgttggaaacgggtttttttcatgtaaggctagacagaagaattcccagtaacttccttgtgttgtgtacattcaactcacagagttgaacgttcccttagacagagcagatttgaaacactctttttgtgcaattgggaagtggagatttcaagcgctttaaggtcaatggcagtaaaggaaatatcttcgtttcaaaactagacagaatcattcccacaaactgcgttgtgatgtgttcgttcaactcacagatgtttaacctttcttttcatagagcagttaggaaacagtctgtttgtaaattctgtaagtggatattctgacatcttgtggccttcgttggaaacgggatttcttcatattctgctagacagaagaattctcagtaacttccttgtgttgtgtgtattcaactcacagagttgaacgatcgtttacacagagcagacttgaaacactctttttgtggaatttgcaagtggagatttcagccgctttgaggtcaatggtagaaaaggaaatatcttcgtataaagactagacagaatgattctcagaaactcctttgtgatgtgtgaattcaactcacagagtttaacctttcttttcacagagcagttaggaaacactctgtttgtaaaatctgcaagtggatattcagacctccttgaggccttcgttggaaacgggatttcttcatattatgctagacagaagaattcccagtaacttccttgtgttgtgtgtgttcaactcacggagttgaactttcatttacacagagcagatttgaaacactctttttgtggaatttgcaagtggagatttcaagcgctttgaggccaaaggcagaaaaggaaatatcttcgtttgaaaactacacagaaatcattctcagaaactgctgcgtgatgtgtgcgttcaacactcagagtttaacttttcttttcattcagcggtttggaaacactctgtttgtaaagtctgcacgtggataatttgaccacttagaggccttcgttggaaacgggattttttcatgtaaggctagacagaagaattcccagtaacttccttgtgttgtgtgcattcaactcaaagagttgaacgttcccttagacagagcagatttgaaacactctatttgtgcaatttgcaagtgtagatttcaagcgctttaaggtcaatggcagaaaaggaaatatcttcgtttcaaaactagacagaatcattcccacaaactgcgttgtgatgtgttcgttcaactcacagagtttaacctttctgttcatagagcagttaggaaacactctgtttgtaaagtctgtaagtggatattctgacatcttgtggccttcgttggaaatgggatttcatcatattctgctagacagaagaattctcagtaacttccttgtgttgtgtttattcaactcacagagttgaatgatcctttacacagagcagactttaaacactctttttgtggaatttgcaagtggagatttcagccgctttgaggtcaatggtagaaaaggaaatatcttcgtataaagactagacagaatgattgtcagaaactcctttgtgatgtgtgcgttcaactcacagagtttaacctttcttttcatagagcagttaggaaacactgtgttgttaaagtctgcaagtggatattcagacctccttgaggccttcgttggaaatgggatttcttcatattctgctagacagaagaattctcagtaacttccttgtgttgtgtgtattcaactcacagagttgaactttcatttagagagagcagatttgaaacactgtttttgtggaatttgcaagaggacatttcacgcgctttggggccaagggcagaaaaggaaatatcttcgtataaaaactagacagaatcattttcagaaactgctgcgtgatgtgtgcgttcaactctcagagtttaacttttcttttcattcagcggtttggaaacagtctgtttgtaaagtctgcacgtggatattttgaccacttagaggccttcgttggaaacgggttttttgcatgaaaggttagacagaagaattctcagtaacttccttgtgttgtgtgtattcaactcacagagttgaacgatactttacacagagcagatttgaaacactctatttgtgcaatttgcaagtgtagttttcaagctctttaaggtcaacggcagaaaaggaaatatcttggtttcaaaactagacagaatcattcccacaaactgcgttgtgatgtgttcgttcaaatcacagagtttaacttttcttttcatagagctgttaggaaacagtctgtttgtaaattctgtaagtggatattctgacatcttgtggccttcgttggaaacgggatttcttcatattctgctagacagaataattctcagtaacttccttatgttgtgtgtattcaactcacagagttgaacgatcctttacacagagcagacttgaaacactctttttgtggaatttgcaagtggagatttcagccgctttgaggtcaatggtagaataggaaatatcttcctatagaaactagacagaatgattctcacaaactcctttgtgatgtgtgcgttcaactcacagagttaaacctttcttttcatagagcagttaggaaacactctgtttgtaaagtctgcaagtggatattcagacctccttgaggccttcgttggaaaggggatttcttcatattatgctagacagaataattctcagtaacttccttgtgttgtgtgtattcaactgacagagttgaactatcatttagagagtgcagatttgaaacactgtttttgtggaatttgtaagtggagatttcaagcgctttggggccaaaggcagaaaaggaaatatcttcgtataaaaactagacagaatcattctcagaaactgctgcgtgatgtgtgcgttcaactctcagagtttaacttttcttttcattcagcggtttggaaacactctgtttgtaaagtctgcacgtggatatattgaccacttagaggccttcgttggaaacgggttttttgcatgtaaggctagacagaagaattcccagtaatttccttgtgttgtgtgcattcaactcacagagttgaacgttcccttagacagagcagatttgaaacactctatttgtgcaatttggaagtgtagatttcaagcgctttaaggtcaatggcagaaaaggaaatatcttcgtttcaaaactagacagaatcattcccacaaactgcgttgtgatgtgttcgttcaacccacagagtttaacctttctgttcatagagcagttaggaaacactctgtttgtaaagtatgaaagtggatattctgacatccttgtggccttcgttggaaacgggatttcttcatattctgctagacagaagaattctcagtaacttccttgtgttgtgtgtattcaactgacagagttgaactttcatttacacagagcggacttgaaacactctttttgtggaatttgcaattggagatttcagccgcgttgaggtcaatggtagaaaaggaaatctcttcgtataaaaactagacagaatgattcacagaaaatcttttgtgatgtgtgcgttcaactcacagagtttaacttttcttctcatggagcagttaggaaacactctgtttgtaaagtctgcaagtggatattcagacccctttgaggccttcgttggaaacgggatttcttcatattctgctagacagaagaattctcagtaacttccttgtgttgtgtgtattcaactgacagagttgaactttcatttagacagagcagatttgaaacactctttttgtggaatttgcaaaggtagatttcatgcgctttgaggccaaaggcagaaaaggaaatatcttcgtataaaaactagacagaatcatgctcagaaactgctctgcgatgtgtgcgttcaactctcagagtttaacttttcttttcattcagcagtttggaaacactctgtttgtcaagtctgcacgtgcataatttgaccgcttagaggccttcgttggaaacgggtttttttcatgtaaggctagacagaagaattcccagtaacttccttgtgttgtgtgcattcaactcacagagttgaacgttcccttagacagagcagatttgaaacagcctatttgtgcaatttgcaagtgtagatttcaagcgctttaaggtcaacggcagaaaaggaaatatcttcctttcaaaactagacagaatgattctcagaaactcctttgtgatgtgtgcgttcaactcacagagtttaacttttcttttcatagagcagttaggaaacactctgtttgtaaagtctgcaagtggatattgagacctctttgaggccttcgttggaaacgggatttcttcatattatgctagacagaataattctcagtaactttccttgtgttgtgtgtattcaactcacagagttgaacgatcctttacagagagcagacttgaaacactctttttgtggaattcgcaagtggagatttcagccgctttgaggtcaatggtagaaaaggaaatgtcttcgtataaagactagacagaatgattcccataaactcctttgtgatgtgtgcgttcaactcacagagtctaacctttctgttcatagagcagttaggaaacactctgtttgtaaagtctgcaagtggatattcagacctccttgaggccttcgttggaaacgggatttcttcatattctgctagacagaagaattcccagtaacttccttgtgttgtgtgtgttcaactcacagaattgaactttcatttacacagagcagatttgaaacactctttttgtggaatttgcaaatggagatttcaagcgctttgaggccaaaggcagaaaaggaaatatcttcgtttcaaaactagacagaatcattctcagaaactgctgcgtgatgtgtgcgttcaactctcagagtttaacttttcttttcattcagcggtttggaaacactctgtttgtgaagtctgcccgtggatattttgaccccttagaggccttcgttggaaacgggtttttttcatgtaaggctagacagaagaattcccagtaacttccttgtgttgtgtgcattcaactcacagagatgaaagatcccttagacagagcagatttgaaacactctatttgtgccatttgcaagtgtagatttcaagcgctttaaggtcaatggcagaaaaggaaatatcttcgtttcaaaactagacagaatcattcccacaaactgcgttgtgatgtgttcgttcaactcacagagtttaacctttctgttcatagagcagttaggaaacactctgtttgtaaagtctgtaagtggatattctgacatcttgtggccttcgttggaaacgggatttcttcatattgtgctagacagaagaattctcagtaacttccttgtgttgtgtgtattcaactcacagagttgaacgatcctttacacagagtagacttgaaacactctttttgtggaatttgcaagtggagatttcagccgctttgaggtcaatggtagaataggaaatatcttcctatagaaactagacagaatgattctcagaaactcctttgtgatgtgtgcgttcaactcacagagtttaacttttcttttcatagagccgttaggaaacactctgtttgtaaagtctgcaagtggatattcagacctctttgaggccttcgttggaaacgggatttcttcatattatgcgtagacagaagaattctcagtaacttccttgtgttgtgtgtattcagctgacagagttgaactttcatttagagagagcagatttgaaacactgtttttgtgtaatttgcaattggagatttcaagcgctttggggccaaacgcagaaaaggaaatatcttcgtataaaaactagacagaatcattctcagaaactgctgtgcgatgtatgcgttcaactctcagagtttaacttttcttttcattcagcagtttggaaacactctgtttgtaaagtctgcacgtggatattttgaccacttagaggccttcgttggaaacgggtttttttcatgtaaggctagacagaagaattcccagtaacttccttgtgttgtgtacattcaactcacagagttgaacgttcccttagacagagcagatttgaaacactctttttgtgaaattggcaagtggagatttcaagcgctttaaggtcaatggcagaaaaggaaataccttcgtttcaaaactagacagaatgattctcagaaactcgtttgtgatgtgtgcgttcaactcacagagtttaacctttcttttcatagagcagttaggaaacactctctaaagtctgcaagtggatattcagacctccttgaggtcttcgttggaaacgggatttcttcatattctgctagacagaagaattctcagtaacttccttgtgttgtgtttattcaactcacagagttgaatgatcctttacacagagcagacttgaaacactctttttgtggaatttgcaagtggagatttcagccgatttgaggtcaatggtataaaagtaaatatcttcgtataaagactagacagaatgattctcagaaactcctttgtgatgtgtgcgttcaactcacagagtttaacctttcttttcatcgagcagttaggaaacactctgtttgtaaagtctgcaagtggatattcagacctctttgaggccatcgttggaaacgggatttcttcatattctgctagagagaggaattctcagtaacttccttgtgttgtgtgtattcaactgacagagttgaactttcttttagagagagcagatttgaaacactgtttttgtggaatttgcaactggagatttcaagcgctttggggccaaaggcagaaaaggaaatatcttcgtataaaaactagacagaatcattctcagaaactgctctgcgatgtgtgcgttcaactctcagagtttaacttttcttttcattcagcagtttggaaacactctgtttgtaaggtctgcaagtggatattcagacctctttgtggccttctttggaaacgggtttttttcatataaggctagacagaagaattcccagtaacttccttgtgttgtgtgcattcaactcacagagttgaacgttcccttagacagagcagatttgaaacactctatttgcgcaatttgcaagtgtagatttcaagcgctttaaggtcaatggcagaaaaggaaatatcttcgtttcaaaactagacagaatcattcccacaaactgcgttgtgatgtgttcgttcaactcacagagtttaacctttcttttcatagagcagttaggaaacactctgtttataaactctgcaagtggatattcagacctctttgaggcctttgttggaaacgggatttcttcatactatgctagacagaagaattctcagaaacctccttgtgttgtgtgtattcaactcacagagttcaatgacgctttacacagagcagacttgaaacactctttttgtggaatttgcaagtggagatttcagccgctttgaggtcaatggtagaataggaaatatcttcctatagaaactagacagaatgattctcagaaactcctttgtgatgtgtgcgttcaactcacagagtttaacctttcttttcatagagctgttaggaaacactctgtttgtaatgtctgcaagtggatattcagacatccttgaggctttcgttggaaacgggatttcttcatattctgctagaaagaagaattctcaggaacttccttgtgttgtgtgtattcaactcagagagttcaacgatcctttacacagagcagacttgaaacactctttttgtggaatttgcaagtggagatttcagccgctttgaggtcaattgtagaaaaggaaatatcttcgtataaaaactagacagaatgattctcagaaactcctttgtgatgtgtgcgttcaactcacagagtttaccctttcttttcatagagcagttaggaaacactctgtttgtaaagtctgcaagtggatattcagacctccttgatgccttcgttggaaacgggatttcttcatattattgtagacagaagaattctcaataacttccttgtgttgtgtgtattcaactcacagagttgaacgatcctttacacagagcagacttgaaacactctttttgtggaatttgcaagtggagatttcagccgctttgaggtcaatggtagaataggaaatatcttcctatagaaactagacagaatcattctcagaaactgctgcgtgatgtgtgcgttcaactctcagagtttaacttttcttttcattcagcggtttggaaacactctgtttgtaaagtctgcacgtggatattttgaccacttagaggccttcgttggaaacgggattttttcatgtaaggctagacagaagaattcccagtaacttccttgtgttgtgtgcattcaactcacagagttgaacgttcccttagacagagcagatttgaaacactctatttgtgcaatttgcaagtgtagatttcaagcgctttaaggtcaacggcagaaaaggaaatatcttcgtttcaaaactatacagaatcattcccacaaactgcgttgtgatgtgttcgttcaactcacagagtttaacctttcagttcatagagcagttaggaaacactctgtttgtaaagtctgtaagtggatattctgacatcttgtggccttcgttggaaacgggatttcttcatattctgcaagacagaagaattctcagtaacttccttgtgttgtgtgtattcaactcacagagttgaacgatcctttacacagagcagacttgaaacactctttttgtggaatttgcaattggagatttcagccgctttgaggtcaatagtagaaaaggaaatatcttcgtagaaaaactagacagaatgattctcagaaactcctttgtgatgtgtgtgttcacctcacagagtttaacctttcttttcatagagcagttagtaaacactctgtttataaagtctgcaactggatattcagacccctttgaggccttcattggaaacgggatttcttcatattatgctagacagaagaattctcagtaatttccttgtgttgtgtgtattcaactcacagagttgaacgatcctttacacagagcagacttgaaacactctttttgtggaatttgcaagtggagatttcagccgcattgggttcaatggtagaataggaaatatcttcctatagaaactagacagaatgattctcagaaactcctttgtgatgtgtgcgttcaactcacagagtttaacctttcttttcatagagcagttaggaaacactctgtttgtaaagtcagcaagtggatattcagacctctttgaggccttcgttggaaacgggatttcttcatattctgctagacagaagaattcccagtaacttccttgtgttgtgtgtgttcaactcacagagttgaactttcatttacacagagcagattggaaacactctttttgtggaatttgcaagtggagatttcaagcgctttgaggccaaaggcagaaaaggaaatatcttcgtataaaaactagacagaatcattctcagaaactgctgtgcgatgtgtgcgtttaactctcagagtttaacttttcttttcattcagcagtttggaaactctctctttgtaaagtctgcacgtggataacttgaccacttagaggccttcgttggaaacgggtttttttcatgtaaggctagacagaagaattcccagtaacttccttgtgttgtggacattcaactcacagagttgaacgttcccttagacagaacagatttgaaacactctttttgtgcaattggcaagtggttatttcagccgctttggggtcaatggtagaaaaggaaatatcttcgtataaaaactagacagaatcattaccacaaactgcgttgtgatgtgttcgttcaactcacagagtttaacctttctcttcatagagcagttaggaaacactctgtttgtgaagtctgtaagtggatattctgacatcttgtggccttcgttggaaacgggatttcttcatattctgctacacagaagaattcccagtaacttccttgtgttgtgtgtattcaactcacagagttgaacgatcctttacacagagcagacttgaaacactctttttgtggaatttgcaagtggagatttcagccgctttgaggtcaatggtagaataggaaatatcttcctatagaaactagacagaatgattctcagaaactcctttgtgatgtgtgcgttcaactcacagagtttaacctttcttttcatagagcagttgggaaacactctgtttgtaaagtctgcaagtggatattcagacctccttgaggctttcgttggaaacgggatttcttcatattctgctagaaagaagaattcccagtaacttcccttgtgttgtgtgtgttcaactcacagagttgaactttcatttagtcagagcagatttgaaacactctttttgtggaatttgcaaatggagatttcaagcgctttgaggccaaaggcagaaaaggaaatatcttcgtataaaaactagacagaatcattctcagaaactgctctgcgatgtgtgcgttcaactctcagagtttaactttgcttttcattcagcagtttggaaacactctgtttgtaaagtctgcacgtggatattttgaccgcttagaggccttcgttggaaacgggtttctttcctgtaaggctagacagaagaattcccagtaacttccttgtgttgtgtacattcaactcacagagttgaacgttcccttagacagagcagatttgaaacactctttttgtgcaattagcaagtggagatttcaagcgctttaaggtcaatggcagaaaaggaaatatcttactttcaaaactagacagaatcattcccacaaactgcgttgtgatgtgttcgttcaactcacagagtttaacctttcttttcatagagcagttaggaaacactctgttggtaaattctgtaagtggatattctgacatcttgtggccttcgttgtaaacgggatttctacatattctgccagacagaagaattctcagaaacttccttgtgttgtgtgttttcaactcacagagttgaacgatcctttacacagagcagacttgaaacactccttttgtggaatttgcaagtggagattttagccgctttgaggtcaatggtagaataggaaatatcttcctatagaaagtagacagaatgattctcagaaactcctttagtgatgtgtgcattcaactcacagagtttaacctttcttttcatagagcagttaggaaacactctgtttgtaaagtctgcaagtggatattcagacctccttgaggccttcgttggaaacgggacttcttcatattatgctacacagaggaattcccagtaacttccttgtgttgtgtgtgttcaactcacagagttgaactttcatttacacagagcagatttgaaacactctttttgtggaatttgcaaatgaagatttcaagcgctttgaggccaaaggcagaaaaggaaatatcttcgtttcaaaactagacagaatcattctcagaaactgctctgcgatgtgtgcgttcaactctcagagtttaacttttcttttcattcagcagtttggaaacactctggttgtaaagtctgcacgtggataacttgaccacttagaggacttcgttggaaacgggtttttttcctgtaaggctagacagaagaattcccagtaacttccttgtgttgtgtgcattcaactcacagagttgaacgttcccttagacagagcagatttgaaacactctatttgtgcaatttgcaagtgtagttttcaagctctttaaggtcaacggcagaaaaggaaatatcttggtttcaaaactagacagaatgattctcagacacttctttgtgatgtgtgcgttcaactcacagagtttaacctttcttttcatagagcagttaggaaacagtctgtttgtcaattctgtaagtggatattctgacatcttgtggccttcgttggaaacgggatttcttcatattctgctagacagaagaattctcagtaactttcttgtgttgtgtgtattcaactcacagagttgaacgatcctttacacagagcagacttgaaacactctatttgtagaatttgcaagtggagatttcagccgctttgaggtcagtagtagaaaaggaaatatcttcgtggaaaaactagacagaatgattctcagaaactcttttgtgatgtgtgcgttcaactcacagagtttaacctttcttttcatagagcagttaggaaacactctgtttgtaaagtctgcaagtggatattcagacctctttgaggccttcgttggaaacgggatttcttcatattctgctagagagaagaattcccagtaacttccttgtgttgtgtgtgttcaactcacagagttgaactttcatttacacagagcagatttgaaacactctttttgtggaatttgcaagtggagatttcaagcgctttgaggccaaagttagaaaaggaaatatcttcgtataaaaactagacagaatcattctcagaaactgctttgcaatgtgtgcgttcaactctcagagtttaacttttcttttcattcagcagtttggaaacactctgtttgtaaagtctgcacgtggatattttgaccacttagaggccttctttggaaacgggtttttttcctgtaaggctagacagaagaattcccagtaacttccttgtgttgtgtacattcaactcacagagttgaacgttcccttagacagagcagatttgaaacactctttttgtgcaattggcaagtggggatttcaagcgcgttgaggtcaatggccgaaaaggaaatatcttcgtttcaaaactagacagaaaatgattctcagaaactcctttgtgatgtgtgcgttcaactcacagagtttaaccgttcttttcatagagtagttaggaaacactctgtttgtaaagtctgcaagtggatattcagacctctttgaggccttcgttggaaacgggatttcttcatattctgctagacagaagaactctcagtaacttccttgtgttgtgtgtattcaactcacagggttgaacgatcctttacacagagcatacttgaaacactcttcttgtggaatttgcaagtggagatttcagccgctttgaggtcaatggtagaataggaaatatcttcctatagaaactagacagaatgattctcagaaactcctttgtgatgtgtgcgttcaactcacagagtttaacctttctgttcatagagcagttaggaaacactgtgtttgtaaagtctgcaagtggatattcagacctccttgaggccttcgttggaaacgggatttcttcatattctgctagacagaagaattcccggtaacttccttgtgttgtgtgtgttcaactcacagagttgaactttcatttacacagagcagatttgcaacactcttttgtggaatttgcaagtggagatttcaagcgctttgaggccaaaggcagaaaaggaaatatcttcgtttcaaaactagacagaatcattctcagaaactgctctgcgatgtgtgcgttcaactctcagagtttaacttttcttttcatttagcagtttggaaacactctgtttgtaaagtctgcacgtggataatttgaccacttagaggccttcgttggaaacgggtttttttcatgtaaggctagacagaagaattcccagtaacttccttgtgttgtgtgcattcaactcacagagttgaacgtacccttagacagagcagatttgaaacactctatttgtgcaatttgcaagtgtagttttcaagctcttttaggtcaacggcagaaaaggaaatatcttggtttcaaaactagacagaatcattcccacaaactgcgttgtgatgtgttcgttcaactcacagagtttaacctttctgttcatagagcagttaggaaacactctgtttgtaaagtctgtaagtggatattctgacatcttgtggccttcgttgggaacgggatttcttcatattctgctagacagaagaattctcagaatcttccttgtgttgtgtgtattcaactcacagagttgaacgatcctttacacagagcagacttgatacagtctttttgtggaatttgcaagtggagatttcagccgctttgaggtccatggtagaaaaggaaatatcttcgtataaaaactagacagaatgattctcagaaactcctttgtgatgtgtgcgttcaactcacagagtttaacctttcttttcatagagcagttaggaaacactctgtttgtaaagtctgcaagtggatattcagacatccttgaggctttcgttgggaacgggttttcttcatattctgctagaaagaagaattctcagtaacttccttgtgttgtgtgtattcaactcacagagttgaactttcatttacacagagcagatttgaaacactctttttgtggaatttgcaaatggagatttcaagggctttgaggccaaaggcagaaaaggaaatatcttcgtttcaaaactagacagaatcattctcagaaactgctctgtgatgtgtgcgttcaactctcagagcttaacttttctgttcattcagcagtttggaaacactctgtttgtaaagtctgcacgtggataatttgaccacttagaggccttcgttggaaacgggtttttttcatgtaaggctagacagaagaattcccagtaacttccttgtgttgtgtgcattcaactcacagagttgaacgttcccttagacagagcagatttgaaacactctatttgtgcaatttgcaagtgtagatttcaagcgctttaaagtcaatggcagaaaaggaaatatcttcgtttcaaaactagacagaatgattctcataaactcctttgtgatgtgtgcgttcaaatcacagagtttaacttttcttttcatagagcagttaggaaacactctgtttgtaaagtctgcaagtggatattcagacctctttgaggccttctttggaaacgggatttcttcatattatgctagacagaataattctcagtaacttccttgtgttgtgtgtattcaactcacagagttgaacgatcctttacacagagcagacttgaaacactctttttgtgcaatttgcaagtggagatttcagccgatttgaggtcaatggtagaataggaaatatcttcctatagaaactagacagaatgattctcagaaactcctttgtgatgtgtgcgttcaactcacagaatttaacatttcttttcatagagcagttaggaaacactctgtttgtaaagtctgcaagtggatattcagacctctttgaggccttcgttggaaacgggatttcttcatattctgctagacagaagaattcccagtaacttccttgtgttgtgtgtgttcaactcacagagttgaactttgatgtacacagagcagatttgaaacactctttttgtggaatttgcaagtggagatttcaagcgctttgaggccaaaggcagaaaaggaaatatcttcgtataaaaactagacagaatcattctcagaaactgctctgcgatgtgtgcgttcaactctcagagtttaacttttcttttcattcagcagtttggaaacactctgtttgtatagtctgcacgtggatattttgaccacttagaggccttcgttggaaacgggtttttttcctgtaaggctagacagaagaattcccagaaacttccttgtgttgtgtgcattcaactcacagagttgaacgttcccttagacagagcagatttgaaacactctatttgtgcaatttgcaagtgtagatttcaagcgctttaaggtcaatggcagaaaaggaaatatcttcgtttcaaaactagacagaatcattcccacaaactgcgttgtgaagtgttcgttcaactcacagagtttaacctttctgttcatagagcagttaggaaacactctgtttgtaaagtctgtaagtggatattctgacatcttgtggccttcgttggaaacgggatttctgcatattctgctagacagaagaattctcagaaacttccttgtgttgtgtgttttcaactcacagagttgaacgatcctttacgcagagcagacttgaaacactctttttgtggaatttgcaagtggagatttcagccgctttgaggtcaatggtataaaaggaaatatcttcgtataaaaactagacagaatgattcacagaaactcctttgtgatgtgtgcgttcaactcacagagtttaaccattcttttcatagagcagttaggaaacactctgtttgtaaagtctgcaagtggatattcagacctctttgaggccttcgttggaaacgggatttcttcatattctgctagacagaagaattcccagtaacttccttgtgttgtgtgtgttcaactcacagagttgaactctcatttacacagagcagatttgaaacactctttttgtggaatttgcaagtggagatttcaagcgctttgaagccaaaggcagaaaaggaaatatcttcgtataaaaactagacagaatcattctcagaaactgctctgcgatgtgtgcattcaactctcagagtttaacttatcttttcattcagcagtttggaaacactctgtttgtaaagtctgcacgtggataatttgaccacttagaggtcttcgttggaaacgggtttttatcatgtaaggctagacagaagaattcccagtaactaccttgtgttgtgtgcattcaactcacagagttgaacgttcccttagacagagcagatttgaaacactctatttgtgcaatttgcaagtgtagttttcaagctctttaaggtcaacggcagaaaaggaaatatcttggtttcaaaactagacagaatcattcccacaaactgcgttgtgatgtgttcgttcaactcacagagtttaacctttcttttcattgagcagttaggaaacagtctgtttgtaaattctgtaagtggatattctgacatcttgtggccttcgttggaaacgggatttcttcatattctgctagacagaagaattctcagtaacttccttgtgttgtgtgtattcaactcacagagttgaacgatcctttacacagagcagacttgaaacactctttttgtggaatttgcaagtggagatttcagccgctttgaagtcaaaggtagaaaaggaaatatcttcgtataaaaactagacagaatgattctcagtaagttctttgtgatgtgtgcgttaaactcacagggattaacctttcttttcatagagcagttaggaaacactctgtttgtaaagtctgcaagtggatattcagacctccttgaggccctcgttggaaacgggatttattcaaattatgctagacagaagaattctcagtaacttccttgtgttgtgtgtattcaactcacagagttgaacgatcctttacacagagcagattagaaacactctttttctcgaatttgcaggtagagatttcagccgctttgcggtcaatagtagaaaagggaatatcttcgtataaaaactagacagaatgattctcagaaactcctttgtgatgtgtgcgttcaactcacagagttcaacctttcttttcatagagcagttaggaaacactctgtttgtaaagtctgcaagtggatattcagacctctttgaggccttcgttggaaacgggttttcttcatattatgctagacagaagaattctcagtagcttccttgtgttgtgtgtattcaactcacagagttgaacgatcctttacacagagcagacttgaaacactctttttgtggaatttgcaattggagatttcagccgctttgaggtcaatggtagaataggaaatatcttcgtataaaaactagacagaatgattctgagaaactcctttgtgatgtgtgcgttcaactcacagagtttaacctttcttttcatagagcagttaggaaacactctgtttgttaagtctgcaagtggatattcagacctctttgaggccttcgttggaaacgggatttcttcatattctgctagactgaagaattctcagtaacttccttgtgttgtgtgtattcaactcacagagttgaacgatcctttacacagagcagacttgaaacactctttttctggaatttgcaagtggagatttcagccgctttgaggtcaatggtagaataggaaatatcttcctatagaaactagacagaatgattctcagaaactcctttgagatgtgtgtgttcaactcacagagtttaacctttcttttcatagagcaattaggaatcactctgtttgtaaagtctgcaagtggatattcagacctctttgaggccttcgttggaaacgggtttttttcatataaggctagagagaagaattctcagtaacttccttgtgttgtgtgtattcaactgacatagttgaactttcatttagagagagcagatttgaaacactgtttttgtggaatttgcaagtggagatttcaagcgctttggggccaaaggcagaaaacgaaatatcttcgtataaaaactagacagaatcattctaagaaactgctctgcgatgtgtgcgttcaactctcagagtttaacttttcttttcattcagcagtttggaaacactctgtttgtaaagtctgcacgtggatattttgaccacttagaggccttcgttggaaacgggtttttttcctgtaaggctagacagaagaattcccagtaacttccttgtgttgtgtacattcaactcacagagttgaacgttcccttagacagagcagatttgaaacactctttttgtgcacttggcaagtggagatttcaagcgctttaaggtcaatggcagaaaaggaaatatcttcgtttcaaaactagacagaatgattctcagaaactcctttgtgatgtgtgtgttcaactcacagagtttaacctttcttttcatagagcagttaggaaacaatctgtttgtaaagtctgcaagtggatattcagacctctttgaggccttcgttggaaacgggtttttttcatataaggctagacagaagaattcccagtaacttccttgtgttgtgtgtgttcgactcacagagttgaactttcatttacacagagcagatttgaaacactctttttgtggaatttgcaagtggagatttcagccgctttgaagtcaaaggtagaaaaggaaatatcttcctataaaaactagacagaatgattctcataaactcctttgtgatgtgtgcgttcaagtcacaaagtttaacttttcttttcatagagcagttaggaaacactctgtttttaaagtctgcaagtggataatcagacctctttgaggccttcgttggaaacgggatttcttcatattatgctagacagaagaattctcagtaacttccttgtgttgtgtgtattcaactcacagagttgaacgatcgtttacacagagcagacttgaaacattctttttgtggaatttgcaagtggagatttcagccgctttgaggtcaatggtagaataggaaatatcttcttatagaaactagacagaatcattctcagaaactgctctgcgatgtgtgcgttcaactctcagagtttaacttttcttttcatttagcagtttggaaacactctgtttgtaaagtctgcacgtggatattttgaccacttagaggcctacgttggaaacgggtttttttcctgtaaggctagacagaagaattcccagtaacttccttgtgttgtgtgcattcaactcacagagttgaacgttcccttagacagagcagatttgaaacactctatttgtgcaatttgcaagtgtagatttcaagcgctttaaggtcaacggcagaaaaggaaatatcttcgtttcaaaactaggcagaatgattctcataaactcctttatgatgtgtgcattcaactcacagagtttcacctttcttttcatagagcagttaggaaacactctgtttgtaaagtctgcaagtagatattcagacctccttgaggccttcgttggaaacgggatttcttcatattctgctagacagaagaattctcagtaacttccttgtgttgtgtgtattcaactcatagagttgaacgatcctttacacagagcagacttgtaacactctttttgtggaatttgcaagtggagatttcagccgctttgaagtcaaaggtagaaaaggaaatatcttcctataaaaactagacagaatgattctcagaatctcctttgtgatgtgtgcgttcaactcacagagtttaacctttcttttcatagagcagttaggaaacactctgtttgtaaagtctgcaagtggatattcagacctctttgaggtcttcgttggaaacgggtttttttcatataaggctagacagaggaattcccagtaacttccttgtgttgtgtgtgttcaactcacagagttgaactttcatttacacagagcagatttgaaacactctttttgtggaatttgcaagtggagatttcaagcgctttgaggccaaaggcagaaaaggaaatatcttcgtataaaaactagacagaatcattctcagaaactgctctgcgatgtgtgcgttgaactctcagagtttaacttttcttttcattcagcagtttgaaaacactctgtttgtaaagtctgcacgtggataacttgaccacgtagaggccttcgttggaaacgggtttttttcatgtaaggctagacagaagaattcccagtaacttccttgtgttgtgtgcattcaattcacagaattgaacgttcccttagacagagcagatttgaaacactctatttgtgcaatttgcaagtgtagatttcaagcgctttaaggtcaatggcagaaaaggaaatatcttcgtttcaaaactagacagaatcattcccacaaactgcgttgtgatgtgttcgttcaactcacagagtttaacctttctgttcatagagcagttaggaaacactctgtttgttaagtctgtaagtggatattcttacatcttgtggccttcgttggaaacgggatttcttcatattctgctagacagaagaattctcagtaacttccttgtgttgtgtgtattcaactcacagagttgaaagatcctttacagagagcagacttgaaacactctttttgtggaatttgtaagtggagatttcagccgctttgaggtcaatggtagaataggaaatatcttaatatagaaactagacagaatgattctcagaaactactttgcgatgtgtgcgttcaactcacagagtttaacctttcttttcatagagcagttaggaaacactctgtttgtaaagtctgcaagtggatattcagacctccttgaggccttcgttggaaacgggatttcttcatattatgctagacagaagatttcccagtaacttccatgtgttgtgtgtgttcaactcacagagttgaactttcatttacacagagcagatttgacacactctttttgtggaatttgcaaatggagatttcaagcgctttgaggccaaaggcagaaaaggaaatatcttcgtataaaaactagacagaatcattctcagaaactgctctgcgatgtgtgcgttcaactctcagagtttaacttttcttttcattcagcagtttggaaacactctgtttgtaaagtctgcacgtggatattttgaccacttagaggccttcgttggaaacgggcttttttcctgtaaggctagacagaagaattcccaggaacttccttgtgttgtgtacattcaactcacagagttgaacgttcccttagacagagcagatttgaaacactctttttgtgcaattggcaagtggtgatttcagcagctttgaggtcaatggtagaaaaggaaatatcttcgtataaaaactagacagaatgattctcagaaactcctttgtgatgtgggtgttcaactcacagagtttaactttcttttcatagagctgttaggaaacactctgtaaagtctgcaagtgggtattttaacctctttgaggccttcgttggaaacgggtttttttcatgtaaggctagagagaagaattctcagtaacttccttttgttgtgtgtattaaactgacagagttgaactttcatttacacagagcagatttgaaacactctttttgtggtatttgcaagtggagatttcagccgctttgatgtcaatgatagaaaaggaaatatcttcatataaaaattagacagaatgattctcagaaactcctttgtgatatgggtgttcaactcacagagtttaacctttcctttcatagagcagttaggaaacactctgtttgtaaagtctgcaagtggatattttcacctctttgaggccttcgttggaaacgggttttttttcatgtaattctagacagaagaattctcagtaactttcttgtgttgtgtgtattcaactgacagagttgaactatcatttagagagtgcagatttgaaacactgtttttgtggaatttgtaagtggagatttcaagcgctttggggccaaaggcagaaaaggaaatatcttcgtataaaaactagacagaatcattctcagaaactgctgcgtgatgtgtgcgttcaactctcagagtttaacttttcctttcattcagcggtttggaaacactctgtttgtaaagtctgcacgtggaaattttgaccacttagtggccttcgttggaaacgggtttttttcatgtaaggctagacagaataattcccagtaacttccttgtgttgtgtacattcaactcacagagttgaacgttcccttagacagagcagatttgaaacactctttttgtgcaattggaaagtggagatttcaagcgcttaaggtcaatggcagaaaaggaaatatcttcgtttcaaaactagacagaatcattcccacaaactgcgttgtgatgtgttagttcaactcacagagtttaacctttcttttcatagagcagttaggaaacactctgtttgtaaattctgtaagtggatattctgacatcttgtggccttcgttggaaacgggatttcttcatattctgctagacagaagaattctcagtaacttccttgtgttgtgtgtattcaactcacagagttgaacgatcctttacacagagcagacttgaaacactctttttgtggaatttgcaagtggagatttcagccgctttgagttcaatgttagaataggaaatatcttcctatagaaactagacagaatgattctcagaaactcctttgtgatgtgtgcgttcaactcacagagtttaatctttcttttcatagagcagttaggaaacactctctaaagtctgcaagtggatattcagacctccttgaggtcttcgatggaaacgggatttcttcatattctgctagacagaagaattcccagtaacttccttgtgttgtgtgtgttcaactcacagagttgaactttcatttacacagagcagatttgaaacactctttttgtggaatttgcaagtggagatttcaagcgctttgaggccaaggcagaaaaggatatatcttcgtataaaaactagacagaatcattctcagaaactgctctgcgatgtgtgcgttcaactctcagagtttaacttttcttttcattcagctgtttggaaacactctgtttgtaaagtctgcacgtggatattttgaccacttagaggccttcgttggaaacgggtttttttacctgtaaggctagacagaagaattcccagtaacttccttgtgttgtgtgcattcaactcacagagttgaacgttcccttagacagagcagatttgaaacactctatttgtgcaatttgcaagtgtagttttcaagctctttaaggtcaacggcagaaaaggaaatatcttggtttcaaaactagacagaatgattctcagaaacgcctttgtgatgtgtgtgttcaactcacagagtttaacctttcttttcatagagcagttaggaaacactctgttggtaatgtctgcaagtggatattcagacctctttgaggccttcgttggaaacgggatttcttcatactgtgctagacagaagaattctcagaatcttccttgtgttgtgtgtattcaactcacagagttgaacgatcctttacacagagcggaattgaaacactctttttgtgaaatttgcaagtggagatttcagccgcgttgaggtcaatggtagaaaaggaaatctcttcgtataaaaactagacagaatgattctcagaaactcctttgtgatgtgtgcgttcaactcacagagtttaacctttcttttcatagagcagttaggaaacactctgtttgtaaagtctgcaagtggatattcacacctccttgaggccttcgttggaaacgggatttcttcatattatgctagacagaagaattctcagtaacttccttgtgttgtgtgtattcaactcacagatttcaacgatcctttacacagagcagacttgaaacactctttttgtggaatttgcaagtggagatttcagccgctttgaggtcaatggtagaataggaaatatcttcctatagaaactagacagaatcattctcagaaactgctctgcgatgtgtgcgttcaactctcagagtttaacttttcttttcattcagcagtttggaaacactctgtttgtaaagtctgcacgtggatattttgaccacttagaggccttcgttggaaacgggtttttttcctgtaaggctagacagtagaattcccagtaacttccttgtgttgtgtacattcaactcacagagttgaacgttcccttagacagagcagatttgaaacactctttttgtgcaattggcaaatggagatttcaagggctttaaggtcaatggcagaaaaggaaatatcttcgtttcaaaactagacagaatcattcccacaaactgcgttgtgatgtgttcgttcaactcacagggtttaacctttcttttcatagagcagttaggaaacagtctgtttgtcaattctgtaagtggatattctgacatcttgtggccttcgttggaaacgggatttcttcatattctgctagacagaagaattctcagtaacttccttgtgttgtgtgtattcaactcacagagttgaacgatcctttacacagagcagacttgtaacactctttttgtggaatttgcaagtggagatttcagccgctttgaagtcaaaggcagaaaaggaaatatcttcgtataaaaactagacagaatgattctcagaaactcctttgtgatgtgtgcgttcaacccacagagtttaacctttcttttcatagagcaattaggaaacactctgtttgtaaagtctgcacgtggatatttggacttctttgaggccttcgttggaaacgggtttttttcatgtaaggctagacagaagaattcccagtaacttccttgtgttgtgtgtgttcaactcacagagttgaactttcatttacacagagcagatttgaaatactctttttgtggaatttgcaggtggagatttcaagcgctttgaggccaaaggcagaaaaggaaatatcttcgtataaaaactagacagaatcattctcagaaactgctctgtgatgtgtgcgttcaactctcagagtttaacttttcttttcattcagcagtttggaaacactctgtaaagtctgcacgtagatattttgaccacttagaggccttcgttggaaacgggtttttttcatgtaaggctagacagaataattcccagtaacttccttgtgttgtgtacattcaactcacagagttgaacgttcccttagacagagcagatttgaaacactctttttgtgcaattggcaagtggagatttgaagcgctttaaggtcaatggcagaaaaggaaatatcttcgtttcaaaactagacagaatgattctcagaaaatcttttgtgatgtgtgcgttcaactcacagagtttaacttttcttctcatagagcagttaggaaacactctgtttgtaaagtgtgcaagtggatattcagacctccttgaggccttcgttggaaacgggatttcttcatattctgctagacagaagaattctcagtaacttccttgtgttgtgtttattcaactcacagggttgaatgatcctttacacagagcagacttgaaacactctttttgtggaatttgcaagtggagatttcagccgctttgaggtcaatggtagaaaagtaaatatcttcgtataaagactagacagaatgattctcagaaactcctttgtgatgtgtgcgttcaactcacagagtttaacctttcttttcatagagcagttaggaaacactctgtttgtaaagtctgcaagtggatattcagacctctttgaggccatcgttggaaacgggatttcttcatattctgctagagagaagaattctcagtaacttccttgtgttgtgtgtattcaactgagagagttgatctttcatttagagagatcagatttgaaacactgtttttgtggaatttgcaagtggagatttcaagcgctttggggccaaaggcagaaaaggaaatatcttcgtataaaaacttgacagaatcattctcagaaactgctgcgtgatctgtgcgttcaactctcagagtttaacttttcttttcattcagcggtttggaaacactctgtttgtaaagtctgcacgtggatattttgaccacttagaggccttcgttggaaacgggtttttttcatgtaaggctagacagaagaattcccagtaacttccttgtgttgtgtgcattcaactcacagagttgaacgttcccttagacagagcagatttgaaacactctatttgtgcaatttgcaagtgtagatttcaagcgctttaaggtcaacggcagaaaaaggaaatatcttcgtttcaaaactagacagaatcattcccacaaactgcgttgtgatgtgttcgttcaactcacagagtttaacctttctgttcatagagcagttaggaaacactctgtttgtaaagtctgtaagtggatattctgacatcttgtggccttcgttggaaaagggatttcttcatattttgctagacagaagaattcccagtaacttccttgtgttgtgtacattccactcacagagttgaacgttcccttagacagagcagacttgtaacactctttttgtggaatttgcaagtggagatttcagccgctttcaagtcaaaggtagaaaaggaaatatcttcctataaaaactagacagaatgattctcagaaactcctttgtgatgtgtgcgttcaactcacagagtttaacctttcttttcatagagcagttgggaaacactctgtttgtaaagtctgcaagtggatattcagacatctttgaggctttcgttggaaacgggatttcttcatattctgctagaaagaagaattcccagtaacttccttgtgttgtgtgtgttcaagtcacagagttgaactttcatttacacagagcagatttgaaacactctttttgtggaatttgcaagtggagatttcaagcgctttgaggccaaaggcagaaaaggaaatatcttcgtttcaaaactagacagaatcattctcagaaactgctctgtgatgtgtgcgttcaactcacagagtttaacttttcttttcattcagcagtttggaaacactctgcttgtaaagtctgcaagtggatatattgacctctttgagtccttcattggatacgggctttttccatgtaaggctagacagaagaattcccagtaacttctttgtgttgggtgcattcaactcacagagttgaacgttcctttagacagagcagatttgaaacactctttttgtgcaatttgcaagtggagatttcaagagctttaaggtcaatggcagaaaaggaaatatcttcgtttcaaaactagacagaatgattctcagaaactcctttgtgatgtgtgcgttcaactcacagagtttaacctttcttttcatagagcagttaggaaacactctgtttgtaaagtctgcatgtggatattcagacctctttgaggccatcgttggaaacgggatttcttcatattctgctagagagaagaattctcagtaacttccttgtgttgtgtgtattcaactcacagagttcaacgatgctttacacagaggagacttgaaacacactttttgttgaatttgcaagtggagatttcagccgatttgaggtcaatggtagaataggaaatatcttcgtataaaaactagacagaatgattctgagaaactcctttgtgatgtgtgcgttcaactcacagagtttaacctttcttttcatagagcagttaggaaacactctgtttgtaaagtgtgcaagtggatattcagacctccttgaggccttcgttggaaaggggatttcttcatattatgctagacagaagaattcccagtaccttccttgtgttgtgtgtgttcaactcacagagttgaactttcatttacacagagcagatttgaaacactctttttgtggaatttgcaagtggagatttcaagcgctttgaggccaaaggcagagaaggaaatatcttcgtttcaaaactagacagaatcattctcagaaactgctctgcgatgtgtgccgttcaactctcagagtttaactttgcttttcattcagcagtttggaaacactctgtttgtaaagtctgcacgtggataatttgaccacttagaggccttcgttggaaacgggtttttttcatgtaaggctagacagaagaattcccagtaacttccttctgttgtgtgcattccactcacagagttgaacgttcccttagacagagcagatttgaaacactctatttgtgcaatttgcaagtgtagatttcaagcgctttaaggtcaatggcagaaaaggaaatatcttcgtttcaaaactagacagaataattcccacaacctgcgttgtgatgtgttcgttcaactcacagagtttaacctttcttttcatagagcagttaggaaacagtctgtttgtcaattctgtaagtggatattctgacatcttgtggccttcgttggaaacgggatttcttcatattctgctagacagaataattctcagaaacttccttgtgttgtgtgtattcaactcacagagttgaacgatcctttacagagagcagacttgaaacactctttttgtggaatttgcaagtggagatttcagccgctttgaggtcagtggtagaataggaaatatcttcctatagaaactagacagaatgattctcagaaactcctttgtgatgtgtgcgttcaactcacagagtttaacctttcttttcatagagcagttaggaaacactctgtttctaaagtctgcaagtggatattcagacctgtttgaggccttcgttggaaacgggtttttttcatataaggctagacagaagaattctcagtaacttctttgtgttgtgtgtattcaactgacagagttgaactttcatttatagagagcagatttgaaacactgtttttgtggaatttgcaagtggagatttcaagcgctttggggccaaaggcggaaaaggaaatatcttcgtataaaaactagacagaatcattctcagaaactgctgcgtgatgtgtgcgttgaactctcagagtttaacttttcttttcattcagcggtttggaaacactctgtttgtaaagtctgcacgaggatattttgaccccttagaggccttcgttggaaacgggtttttttcatgtaaggctagacagaagaattcccagtaacttccttgttttgtgtgcattcaactcacagagttgaacgttcccttagacagagcagatttgaaacactctatttgtgcaatttgcaagtgtagatttcaagcgctttaaggtcaacggcagaaaaggaaatatcttcgtttcaaaactagacagaatcattcccacaaactgcgttctgatgtgttcgttcaactcacagagtttaacctttctgttcatagagcagttaggaaacactctgtttgtaaagtctgtaagtggatattctgacatcttgtggccttcgttggaaacgggatttcttcatattctgctagacagaagaattctcagtaactttccttgtgttgtgtgtattcaactcacagagttgaacgatcctttacacagagcagacttgtaacactctttttgtggaatttgcaattggagatttcagccgcgttgaggtcaatggtagaaaaggaaatatcttcgtataaaaactagacagaatgattctcagaaactcctttgtgatgtgtgcgctcaactcacagagttcaacctttcttttcatagagcagttaggaaacactctgtttgtaaagtctgcaagtggatattcagacctctttgaggccttcgtaggaaacgggatttcttcatattatgctagacagaagaattcccagtaacttccttgtattgtgtgtgttcgactcacagagttgaactttcatttacacagagcagatttgaaacactctttttgtggaatttgcaagtggagatttcaagcgctttgaggccaaaggcagaaaaagaaatatcttcgtttcaaaactagacagaatctttctcagaaactgctctgggatgtgtgcgttcaactcacagagtttaacttttctttccattcagcagtttggaaacactctgtttggaaagtctgcacgtggatattttgacctctttgaggccttcgttggaaacgggtttttttcatgtaaggctagacagaagaattctcagtaacttccttgtgttgtgtgtattcggctcacagagttgaacaatcctttacacagagcagacttgaaacactctttttgtggaatttgcaagtggagattacagccgctttgaggtcaatggtagaaaaggaaatatcttcgtataaagactagacagaatgattctcataaactcctttgtgatgtgtgcgttcaactcacagagtttaacttttcttttcatagagcagttaggaaacactctgtttgtaaagtctgtaagtggatattctgacatcttgtggccttcgttggaaacgggatttcttcatattctgctagacagaagaattctcagaaacttccttgtgttgtgtgtattcaactcacagagttgaacgatcctttacatagagcagacttgaaacactctttttgtggaatttgcaagtggagatttcagccgctttgaggtcaacggtagaataggaaatatcttcctatagaaactagacagaatgattctcagaaactcctttgtgatgtgtgcgttcaactcacagagtttaacctttcttttcatagagcagttaggaaacactctgtgtgtaaagtctgcaagtggataattcagacatccttgaggccttcgttggaaactggatttcttcatattatgctagacagaagaattctcagtaacttccttgtgttgtgtgtattcaactgacagagttgaactttcatttagagagatcacatttgaaacactgtttttgtggaatttgcaagtggagatttcaagcgctttggggccaaaggcagaaaaggaaatatcttcgtataaaaactagacagaatcattctcagaaactgctgcgtgatgtgtgcattcaactctcagagtttaacttttcttttcattcagcggtttggaaacactctgtttgtaaagtccgcacgtggatattttcaccacttagaggccttcttttgaaacggttttttgcatgtaaggctagacagaagaattcccagtaacttccttgtgttgtgtacattcaactcacagagttgaacgttcctttagacagagcagatttgaaacactctttttgtgcaattggcaagtggagatttcaagcgctttaaggtcaatggcagaaaaggaaatattttcgtttcaaaactagacagaatgattctcagaaacttcatttgtgaagtgtgcgttcaactcacagagtttaacctttcttttcatagagcagttaggaaacactctgtttgtaaactctgcaagtggatattcagacctctttgaggccttcgttggaaacgggatttcttcatactgtgctagacagaagaattctcagtaacttccttgtgttgtgtgtattcaactcacagagttgaacgatcctttacacagagcagacttgtaacactctttttgtggaatttgcaagtggagatttcagccgctttgaagtcaaaggtagaaaaggaaatatcttcctataaaaattagacagaatgattctcagaaactcctttgtgatgtgtgcgttcaactcacagagtttaacttttcttttcatagagcagttaggaaacactctttttgtaaagtctgcaagtggatattcagacctctttgaggccttcgttggaaacgggtttttttcatataaggctagacagaagaattcccagtaacttccttgtgttgtgtgtgttcaactcacagagttgaactttgatttacacagagcagatttgaaacactctttttgtggaatttgcaaatggagatttcaagcgctttgaggccaaaggaagaaaaggaaatatcttcgtataaaaactggacagaatgattctcagaaactgctctgtgatgtgtgcgttcaactctcagagtttaactttccttttcattcagcagtttggaaacactctgtttgaaaagtctgcacgtggataatttgaccacatagaggccttcgttggaaacgggtttttgtcatgtagggctagacagaagaattcccagtaacttccttgtgttgtgtacattcaactcacagagttgaacgttcccttagacagagcagatttggaacactctttttgtgcaattggcaagtggagatttcaagcgctttgaggtcaatggcagaaaaggaaatatcttcgtttcaaaactagacagaatcattcccacaaactgcgttgtgatgtgttcgttcatctcacagagtttaacctttcttttcatagagcagttaggaaacactctgtttgttaattctgtaagtggatattctgacatcttgtggccttcgttggaaacgggatttcttcatattctgctagacagaagaattctcagtaacttccttgtgttgtgtgtattcaactcacagagttgaatgatcctttacacagaacagtcttgaaacactctttttgtggaatttgcaagtggagatttcagccgctttgaggtcaatggtagaataggaaatatctacctatagaaattagacagaatgattctcagaaacttctttgtgatgtgtgcgttcaactcacagagtttaacctttcttttcatagagcagttaggaaacactgtgtttttaaactgtgcaagtggatattcagacctctttgaggccttcgttggaaacgggatttcttcatactgtgctggagagaagaattctcagtaacttccttgtgttgtgtgtattcaactgacagagttgaactttcatttagagagagcacatttgaaacactgtttttgtggaatttgcaagtggagatttcaagagctttggggccaaaggcagaaaaggaaatatcttcgtataaaaactagacagaaatcattctcagaaaactgctgcgtgatgtgtgcgttcaactctcagagtttaacttttcctttcattcagcggtttggaaacactctgtttgtaaagtctgcacgtggatattttgaacacttagaggccttcgttggaaacgggtttttttcatgtaaggctagacagaagaattcccagtaacttccttgtgttgtgtacattcaactcacagagttgaacgttcccttagacagagcagatttgaaacactctttttgtgcatttggcaagtggtgatttcagccgctttgaggtcaatggtagaaaaggaaatatcttcgtataaaaactagacagaatcattcccacaaactgcgttgtgatgtgttcgttcaactcacagagtttaacctttcttttcatagagcagttaggaaacagtctgtttgtcaattctgtaagtggatattctgacatcttgtggccttcgttggaaacgggatttcttcatattcctgctagacagaagaattctcagtaacttccttgtgttgtgtgtattcaactcacagagttgaacgatcctttacacagagcagacttgaaacactctttttgtggaatttgcaaatggagatttcagccgctttgatgtcaatggtagaaaaggtaatatcttcgtataaagactagacagaatgattctcagaaactcctttgtgatgtgtgtgttcaactcacagagttcaacctttcttttcatagagcagttgggaaacactctgtttgtaaagtctgcaagtggatattcagacttctttgaggccttctttggaagcgggatttcttcatgttctgctagacagaagtaattctcagtaacttccttgtgttgtgtgtattcaactcacagagttgaacgatcctttacacagagcagacttgtaacactctttttgtggaatttgcaagtggagatttcaagcgctttgaggccaaaggcagaaaaggaaatatcttcgtttcaaaactagacagaatcattctcagaaactgctctgcgatgtgtgcgttcaactctcagagtttaacttttcttttcattcagcagtttggaaacactctgtttgtaaagtctgcacgtggatattttgaccacttagaggccttcgttggaaacgggtttttttcctgtaaggctagacagtagaattctcagtaacttccttgtgttgtgtgtattcaactcacagagttgaacgatcctttacagagagcagacttgaaacactctttttgtggaatttgcaagtggagatttcagccgctttgaggtcaatggtagaataggaaatatctttctatagaaactagacagaatgattctcagaaactcctttgtgatgtgtgcgttcaactcacagagtttaacctttcttttcatagagcagttaggaaacactctgtttgtaaagtctgcaagtggatattcagacctctttgaggccttcgttggaaacgggatttcttcatattctgttacacagaagaattctcagtaacttccttgtgttgtgtgtattcaactcacagagttgaacgatcctttacacagagcagacttgaaacactctttttgtagaatttgcaagtggagatttcagccgctttgaggtcaatagtggaaaaggaaatatcttcgtagaaaaactagacagaatgattctcagaaactcctttgtgatgtgtgcgttcaactcacagagtttaacctttcttttcatagagcagttaggaaacactctgtttgtaaagtctgcaagtggatattcagacatcattgaggctttcgttggaaacgggatttcttcatattctgctagaaagaagaattcccagtaacttccttgtgttgtgtgtgttcaactcacagtaggtgaacggtcctttacacaggagcagatttgagacactctttttgtggaatttgctaatggagatttcaagcgctttgaggccaaaggcagaaaaggaaatatcttcgtataaaaactagacagaatcattctcagaaactgctctgcgatgtctgcgtacaactctcagagtttaacttttcttttcattcagcagtttggaaacactctgtttgtaaagtctgcacgtggataatttgaccacttagaggccttcgttggaaacgggtttttttcatgtaaggctagacagaagaattcccagtaacttccttgtgttgtgtacattcaactcacagagttgaacgttcccttagacagagcatatttgaaacactctttttgtgcaattggcaagtggagatttcaagtgctttaaggtcaatggcagaaaaggaaatatcttcgtttcaaaactagacagaatcattcccacaaactgcgttgtgatgtgttcgttcaactcacagagtttaacctttcttttcatagagcagttaggaaacagtctgtttgtaaattctgtaagtggatattctgacatttgtggccttcgttggaaacgggatttcttcatattttgctagacagaagaattctcagaaactttgttgtgttgtgtgttttcaactcacagagttcaacgatcctttacacagagtagacttgaaacactctttttgtggaattggcagggtggagatttcagccgctttgaggtcaatggtagaaaaggaaatatcttcgtataaaaactagacagagtgattctcagaaactcctttgtgatgtctgcgttcaactcacagagtttaacctttcttttcatagagcagtttggaaacactctgtttgtaaagtctgcaagtggatattcagacctccttgaggccttcgttggaaacgggatttcttcatattctgctatacagaagaattctcactaacttccttgtgttgtgtgtattcaactgacagagttgaacattcatttagagagagcagatttgaaacactgtttttgtggaatttgcaagtggagatttcaagcgctttggggccaaaggcagaaaaggaaatatcttcgtataaaaactagacagaatcattctcagaaactgctgcgtgatgtgtgcgttcaactctcagagtttaacttttcttttcattcagcggtttggaaacactctgtttgtaaagtctgcacgtggatattttgaccacttagaggccttcgttggaaacgggttttcttcatgtaaggctagacagaagaattcccagtaacttccttgtgttgtgtgcattcaactcacagagttgaacgttcccttagacagagcagatttgaaacactctatttgtccaatttgcaagtgtagatttcaagcgctttaaggtcaacggcagaaaaggaaatatcttcgtttcaaaactagacagaatgattctcataaactcctttgtcatgtgtgcgttcaactcacagagtttaacttttcttttcatagagcagttaggaaacactctgtttgtaaagtctgcaagtggatattcagacctctttgaggcctttgttggaaacgggatttcttcatattatgctagacagaagaattctcagtaacttccttgtgttgtgtgtattcaactcacagagttgaacgatcctttacacagagcagacttgaaacattctttttgtggaatttgtaagtggagatttcagccgctttgaggtcaatggtagaataggaaatatcttcctatagaaattagacagaatgattctcagaaactcctttgtgatgtgtgctttcaacgcacagagtttaacctttcttttcatagagcagttaggaaacactctgtttgtaaagtctgcaagtggatattcagacctccttgaggccttcgttggaaacgggagtttcttcctattatgctagacagaagaattctcagtaacttccttgtgttgtgtgtattcaactcacagagttgaactatcctttacacagagcagacttgaaacactctttttgtggaatttgcaagtggagatttcagccgctttgagttcaatggtagaataggaaatatcttcctatagaaactagacagataatcattctcagaaactgctgcgtgatgtgtgcgttcaactctcagagtttaacttttcttttcattcagcggtttggaaacactctgtttgtaaagtctgcacgtggatattttgaccacttagaggccttcgttggaaacgggtttttttcatgtaaggctagacagaagaattcccagtaacttccttgtgttgtgtgcattcaactcacagagttcaacgttcccttagacagagcagatttgaaacactctatttgtgcaatttgcaagtgtagatttcaagcgctttaatgtcaatggcagaaaaggaaatatcttcgtttcaaaactagacagaatcattcccacaaactgcgttgtgatgtgttcgttcaactcacagagtttaacctttcttttcatagagtagttaggaaacagtctgtttgtaaattctgtacgtggatattctgacatcttgtggccttcgttggaaacgggatttcttgatattctgctagacagaagaattctcactaacttccttgtgttgtgtgtattcaactcacagagttgaacgatcctttacacagaggagacttgaaacactctttttgtggaatttgcaagtggagatttcagccgctttgaggtcaatggtagaaaaggaaatatcttcgtataaagactagacagaatgattctcagaaactcctttgtgatgtgtacgttcaactcacagagtttaacctttcttttcatagagcagttaggaaacactctgtttgtaaagtctgcaagtggatattgagacctctttgaggccttcgttggaaacgggtttttttcatataaggctagacagaagaattctaagtaacttccttgtgttgtgtgtattcaactgacagagttgaactttcatttagagagagcagatttgaaacactgttttggtggaatttgcaagtggagatttcaagcgatttggggccaaaggcagaaaaggaaatatcttcgtataaaaactagacagaatcattctcaaaaactgctgcgtgatgtttgcgttcaactctcagagtttaacttttcttttcattcagcggtttggaaacactctgtttgtaaagtctgcacgtggatattttgaccacttagaggccttcgttggaaacgggtttttttcatgtaaggctagacagaagaattcgcagtaacttccttgtgttgtgtacattcaactcacagagttgaacgttcccttagacagagcagatttgaaacactctttttgtgcaattggcaaatggagatttcaagcgctttaaggtcaatggcagaaaaggaaatatcttcgtttcaaaactagacagaatgattctcataaactcctttgtgatgtatgcgttcaactcacagagtttaacctttcttttcatagagcagttaggaaacactctgtttgtaaagtctgcaagtggatattcagacctccttgaggccttcgttggaaacgggatttcttcatattatgctagacagaataattctcagtaacttccttgtgttgtgtgtattcaactcacagagttgaatgatcctttacacagagcagacttgaaacactctttttgtggaatttgcaagtggagatttcagccgctttgaggtcaatggtagaaaagtaaatatcttcgtatgaagactagacagaatgattctcagaaactcctttgtgatgtgtgcgttcaactcacagagtttaacctttcttctcatagagcagttaggaaacactctgtttgtaaagtctgcaagtggatattcagacctctttgaagccttcgttggaaacgggatttcttcatattatgctagacagaagatttcccagtaacttccttgtgttgtgtgtgttcaactcacagagttgaactttcatttacacagagcagatttgaaacactctttttgtggaatttgcaaatggagatttcaagcgctttgaggccaaaggcagaaaaggaaatatcttcgtataaaaactagacagaatcattctcagaaactgctctgcgatgtgtgcgttcaactctcagagtttaacttttcttttcattcagcagtttggaaacactctgtttgtaatgtctgcacgtggatattttgaccacttagaggccttcgttggaaacgggtttttttcctgtaaggctagacagaagaattcccagtaacttccttgtgttgtgtacattcaactcacagagttgaacgttcccttagacagagcagatttgaaacactctttttgtgcaattagcaagtggagatttcaagcgctttaaggtcaatggcagaaaaggaaatatcttactttcaaaactagacagaatcattcccacaaactgcgttgtgatgtgttcgttcaactcacagagtttaacctttcttttcatagagcagttaggaaacactctgtttgtaaattctgtaagtggatattctgacatcttgtggccttcgttggaaacgggatttcttcatattctgctagacagaagaattcctcagtaacttcccttgtgttgtgtgtattcaactcacagagttgaacgatcctttacacagagcagacttgaaacactcgttttgtggaatttgcaagtggagatttcagccgcgttgaggtcaatggtagaaaaggaaatatcttcgtataaaaactagacagaatgattctcagaaaatcctttgtgatgtgtgcgttcaactcacagagtttaacttttcttttcatggagcagttaggaaacactctgtttgtaaagtctgcaagtgaatattcagacctctttgaggccttcgttggaaacgggatttcttcatattatgctagacagaataattctcagtaacttccttgtgttgtgtgtattcaactcacagagttgaacgatcctttacagagagcagacttgaaacactctttttgtggaatttgcaagtggagatttcagccgctttgaggtcaatggtagaataggaaatttcttcctatagaaactagacagaatcattctcagaaactgctctgcgatgtgtgcgttcaactctcacagtttaacttttcttttcattcagcagtttggaaacactctgtttgtaaagtctgcacgtggataatttgaccacttagaggccttcgttggaaacgggtttttttcatgtaaggctacacagaagaattcccagtaacttccttgcgttgtgtacattcaactcacagagttgaacgttcccttagacagagcagatttgaaacactctttttgtgcaattggcaagtggagatttcaagcgctttaaggtcaatggcagaaaaggaaatatcttcgtttcaaaactagacagaatcattcccacaaactgcgttgtgatgtgttcgttcaactcacagagtttaaccattcttttcatagagcagttaggaaacagtctatttgaaaattctgtaagtggatattctgacatcttgtggccttcgttggaaacgggatttcttcatattctgctagacagaggaattctcaggaacttccttgtgttgtgtgtattcaactcacagagttgaacgaccctttacacagagcagacttgaaacactctttttgtggaatttgcaagtggagatttcagccgctttgagttcaaatgtagaataggaaatatcttcctatagaaagtacacagaatgattctcagaaaatcctttgtgatgtgtgccttcaactcacagagtttaacttttcttttcatcgagcagttaggaaacactctgtttgtaaagtctgcaagtggatattcagacgtctttgaggccttcgttggaaacgggatttcttcatattatgctagacagaagaattcccagtaacttccttgtgttgtgtgtgttcaactcacagagttgaactttcatttacacagagcagatttgaaaccctctttttgtggaatttgcaaatggagatttcaagcgctttgaggccaaaggcagaaaaggaaatatcttcgtataaaaactagacagaatcattctcagaaactgctctgcgatgtgtgcattcaactctcagagtttaatttttcttttcattcagcagtttggaaacattctctttgtaaagtctgcacgtggatattttgacaacttagaggccttcgttggaaacgggttttattcttgtaaggctagacagaagaattcccagtaacttccttgtgttgtgtgcattcaactcacagagctgaacgttcccttagacagagcagatttgaaacactctatttgtgcaatttgcaagtgtagatttcaagcgctttaaggtcaatggcagaaaaggaaatatcttcgtttcaaaactagacagaatcattcccacaaactgctttgtgatgtgttcgttcaactcacagagtttaaactttcttttcatagagcagttaggaaacagtctgtttgtcaattctgtaagtggatattctgacatcttgtggccttcgttggaaacgggatttcttcatattctgctagacagaagaattctcagtaacttccttgtgttgtgtttattcaactcacagagttgaatgatcctttacacagagcagacttgaaacactctttttgtggaatttgcaagtggagatttcagccgctttgaggtcaatgttagaaaaggaaatatcttcgtataaagactagacagaatgattctcagaaactcctttgtgatgtgtgcgttcaactcacagagtttaacttttcttttcatagagcagttaggaaacactctgtttgtaaagtctgcaagtggatattcagacctctttgagtccttcattggaaacgggatttcttcatattatgctagacagaagaattctcagtaacttccttgtgttgtgtgtattcaactcacagagttgaacgatcctttacactgagcagacttgaaacattctttttgtggaatttgcaagtggagatttcagccgctttggggtcaatggtagaataggaaatatcttcgtagaagaactagacagaatcattctcagaacctgctgcgcgatgtgtgcgttcaactctcagagtttaacttttcttttcattcagcggtttggaaacactctgtttgtaaagtctgcacgtggatattttgaccacttagagtccttcgttggaaacgggtttttttcatgtaaggctagacagaagaattcccagtaacttccttgtgttgtgtacattcaactcacagagttgaacgttcccttagacagagcagatttgaaacactctttttgtgcaattggcaagtggagatttcaagcgctttaaggtcaatggcagaaaaggaaatatcttcgtttcaaaactagacagaatcattcccagaaactgcgttgtgatgtgttcgttcaactcacagagtttaacctttcttttcatagagcagttaggaaacactctgtttgtaaagtctgtaagtggatattctgacgtcttgtggccttcgttggaaacgggatttcttcatattctgctagacagaagaattctcagtaacttccttgtgttgtgtgtattcaactcacagagttgaatgatcctttacacagaacagacttgaaacactctttttgtggaatttgcaagtggagatttcagccgctttgaggtcaacggtagaataggaaatatcttcctatagaaactagacagaatgattctcagaaactgctttgtgatgtgtgcgttcaactcacagagtttaaccttccttttcatagagcagttaggaaacactctgtttgtaaaatctgcaattggatattcagacctctttgaggccttcgttgcaaacgggatttctttatgttatgctacacagaagaattctcagtaacttccttgtgttgtgtgtattcaactcacagagttgaactttcatttacacagagcagattggaaacactcttttgtggaatttgcaagtggagatttcaagcgctttgaggccaaaggcagaaaaggaaatatcttcgtataaaaactagacagaatcattctcagaaactgctctgcgatgtgtgcgttcaactctcagagtttaacttttcctttcattcagcagtttggaaacactctgtttgtaaagtctgcacgtgcataatttgaccacttagatgccttcgttggaaacgggttttttccatgtaaggctagacagaagaattctcagtaacttccttgtgttgtgtgtattcaactcacagagttgaacgatcctttacacagagcagacttggaacactctttttgtggaatttgcaagtggagatttcagccgctttgaggtccatggtagaaaaggaaatatcttcgtataaaaaccagacagaatcattcccacaaacttgggttgtgatgtgttcgttcaactcacagagtttaacctttcttttcatagagcagttaggaaacagtctgtttgtcaattctgtaagtggatattctgacatcttgtggccttcgttggaaacgggatttcttcatattctgctagacagaataattctcagtaacttccttgtgttgtgtgtattcagctcacagagttgaacgatcctttacacagagcagacttgaaacactctttttgtggaatttgcaagtggagatttcagccgctttgaggtcaatagtagaaaaggaaatatcttcgtagaaaaacaagacagaatgattctcagaaactcctttgtgatgtgggcgttcaactcacagagtttaacctttcttttcatagagcagttaggaaacactctgtttgcaaagtctgcaagtggatattcagacctctttgacgccttcgttggaaacgggatttcttcatattctgctagacagaagaattctcagtaacttctttgtgttgtgtgtattcaactgacagagttgaactttcatttagagagagcagatttgaaacactgtttttgtggaatttgcaagtggagatttcaagcgctttggggccaaaggcagaaaaggaaatatcttcttataaaaactagacagaatcattctcagaaaccgctctgtgatgtgtgcgttcaactcgcagagtttaacttttcttttcattcagcagtttggaaacactctgtttgtaaagtctgcacgtggatattttgaccacttagaggccttcgttggaaacgggttttttttcatgtaaggctagacagaagaattcccagtaacttccttgtgttgtgtgcattcaactcacatagttgaacgttcccttagacagagcagatttgaaacactctatttgtgcaatttgcaagtgtagatttcaagcgctttaaggtcaatggcagaaaaggaaatatcttcgtttcaaaactagacagaatcattcccacaaactgcgttgtgatgtgttcgttcaactcacagagtttaacctttctgttcatagagcagtgaggaaacactctgtttgtaaagtctctaagtggatattctgacatcttgtggccttcgttggaaacgggatttcttcatattctgctagacagaagaattctcagtaacttccttgtgttgtgtgtattcaactcacagagttgaacgatcctttacacagagcagaattgaaacattctttttgtggaatttgcaagtggagatttcagccgctttgaggtcaatggtagaataggaaatatgttcctatagaaactagacagaatgattctcagaaactcctttgtgatgtgtgtgttcaactcacagagtttaacctttcttttcctagagcagttagtaaacactctgtttataaagtctgcaagtggatattgagacccctttgaggccttcgttggaaacgggatttcttcatattatgctagacagaagaattcccagtaacttccttgtgttgtgtgtgttctactcacagagttgaactttcatttacacagagcagatttgaaacactctttttgtggaatttgcaaatggagatttcaagcgctttgaggccaaaggcagaaaaggaaatatcttcgtataaaaactagacagaatcattctcagaaactgctctgcgatgtgtgcgttcaactctcagagtttaacttttcttttcattcagcagtttggaaacactctgtttgtaaagtctgcacgtggataatttgaccacttagaagccttcgttggaaacgggtttttttcatgtaaggctagacagaagaattctcagtaacttcccttgtgttgtgtgtattcaactcacagagttgaacgatcctttacacagagcagacttgtaacactctttttgtggaatttgcaagtggagatttcagccgctttgatgtcaaaggtagaaaaggaaatatcttcctataaaaactagacagaatgattctcagaaactcctttgtgatgtgtgcgttcaactcacagtttaacctttcttttcatagagcagttaggaaacactctgtttgtaaagtctgcaagtggatattcagacctctttgaggctttccttggaaacgggatttcttcctattctgctagacagaataattctcagtaacttccttgtgttgtgtgtattcaactcacagagttgaacgatcctttacacagagcagacttgaaacattctttttgtggaatttgcaactggagatttcagccgctttgaggtcaatggtagaataggaaatatcttcctatagaaactagacagaatgattctcagaaactcctttgtgatgtgtgcgttcaactcacaaagtttaacctttcttttcatagagcagttaggaaacactctgtttgtaaagtctgcaagtggatattcagacctctttgaggccttcgttggaaacgggatttgttcatactatgctagacagaagaattctcagtaacttccttgtgttgtgtgtattcaacttacagagttgaactttcatttagagagagcagatttgaaacactgtttttgtggaatttgcaattggagatttcaagcgctttggggccaaaggcagaaaaggaaatatcttcgtataaaaactagacagaatcattctcagaaactgctgcgtgatgtgtgcgttcaactctcagagtttaacttttcttttcattcagcggtttcgaaacactctggttgtaaagtctgcacgtggatattttgaccacttagagtccttcgttggaaacgggttttttgcatgtaaggctagacagaagaattcccagtaacttccttgtgttgtgtgcattcaactcacagagttgaacgttcccttagacagagcagatttgaaacactctatttgtgcagtttgcaagtgtagatttcaagcgctttaaggtcaatggcagaaaaggaaatatcttcgtttcaaaactagacagaatgattctcagaaactcctttgtgatgtgtgcgttcaactcacagagtttaacctttcttttcatagagcagttaggaaacactctgtttgtaaagtctgcaagtggatattcagacatccttgaggctttctttggaaacgggatttcttcatattctgctagaaagaagaattctcagtaacttccttgtgttgtgtgtattcaactcacagagttcaacgatcctttacacagagtagacttgaaactctttttgtggaattggcagggtggagatttcagccgctttgaggtcaatggtagaaaaggaaatatcttcgtataaaaactagacagaatgattctcagaaactgctttgtgatgtgtgcgttcaactcacagagttcaacctttcttttcatagagcagttagggaacactctgtttgtaaagtctgcaagtggatatccagacctctttgaggccttcgttggaaacgggttttcttcatattatgctagacagaagaattctcagtaacttccttgtgttgtgtgtattcaactgacagagttgaactttcatttagagagagcagatttgaaacactgtttttgtggtatttgcaagtggagatttcaagcgctttggggccaaaggcagaaaaggaaatatcttcgtataaaaactagacagaatcattctcagaaactgctgcgtgatgtgtgcgttcaactctcagagtttaacttttcttttcattcagcggtttggaaacactctgtttgtaaagtctgcacgtggatattttgaccacttagaggccttcgttggaaacgggttttatgcatgtaagcctagacagaagaattcccagtaacttccttgtgttgtgtgcattcaactcacagagttgaacgttcccttagacagtgcagatttgaaacactctatttgtgcaatttgcaagtgtagatttcaagcgctttaaggtcaatggcagaaaaggaaatatcttcgtttcaaaactagacagaatcattcccacaaactgcgttgtgatgtgttcgttcaactcacagagtttaacctttcttttcatagagcagttaggaaacagtctgtcaattctgtaagtggatattctgacatcttgtggccttcgttggaaacgggatttcttcatattctgctagacagaagaattctcagtaacttccttgtgttgtgtgtattcaactcacagatttgaacgatcctttacacagagcggagttgaaacactctttttgtggaatttgcaagtggagatttcagccgcgttgaggtcaatggtagaaaaggaaatatcttcgtataaaaactagacagaatgattctcagaaacttctttgtgatgtgtgcgttcaactcacagagtttaacctttcttttcatagagcagttaggaaacactctgtttgtaaactctgcaagtggatattcagacctctttgaggccttggttggaaacgggatttcttcatactatgctagacagaagatttctaagtaacttccttgtgttgtgtgtattcaactgacagagtttaactttcatttagagagagcagatttgaaacactgttttcgtggaatttgcaagtggagatttcaagcgctttggggccaaaggcagtaaaggaaatatcttcgtataaaaactagacagaatcattctcagaaactgctctgtgatgtgtgcgttcaactctcagagtttaacttttgttttcattcagcagtttggaaacactctgtttgtaaagtctgcacgtggatattttgaccacttagaggccttcgttggaaactggtttttttcaagtaaggctagacagaagaattcccagtaacttccttgtgttgtgtgcattcaactcaaagagttgaacgttcccttagacagagcagatttgaaacactctatttgtgcaatttgcaagtgtagatttcaagcgctttaaggtcaatggcagaaaaggaaatatcttcgtttcaacacaagacagaatcattcccacaaactgcgttgtgatgtgttcgttcaactcacagagtttaacctttctgttcatagagcagttaggaaacactctgtttgtaaagtctgtaagtggatattctgacatcttgtggccttcgttggaaaagggatttcttcatattctgctagacagaagaattctcagtaacttccttgtgttgtgtttattcaactcacagagttgaacgatcctttacacagagcagacttgaaacactctttttgtggaatttgcaagtggagatttcagccgctttgaggtcaatggtagaaaagtaaatatcttcgtataaagactagacagaacgattctcagaaactcctttgtgatgtgtgcgttcaactcacagagtttaacctttcttttcatagagcagttaggaaacactctgtttgtaaagtctgtaagtggatattctgacattttctggccttcattggaaaagggatttcttcatattctgctagacagaagaattctcagtaacttccttgtgttgtgtgtattcaactcacagagttgaatgatcctttacagagatcagacttgaaacactctttttgtggaatttgcaagtggagatttcagccgctttgaggtcaatggtagaatagaaatatcttcctatagaaactagacagaatcattctcagaaagtgctctgcgatgtgtgcgttcaactctcagagtttaacttttcttttcattcagcagtttggaaacactctgtttgtaaagtctgcacgtggatattttgaccacttagaggccttcgttggaaacgggtttttttcctgtaaggctagacagaagacttcccagtaacttccttgcgttgtgtacattcaactcacagagttgaacgttcccttagacagagcagatttgaaacactctttttgtgcaattggcaagtggagatttcaagcgctttgaggtcaatggcagaaaaggaaatatcttcgtttcaaaactagacagaatcattcccacaaactgcgttgtaatgtgtgcgttcaactcacagagtttaacctttcttttcatagagcagttaggaaacactctgtttgtgaagtctgcaagtggatattcagacctctttgaggccttcgttggaaacgggatttcttcatattctgctagacagaagaattctcagtaacttccttgtgttgtgtgtattcaactcacagagttgaacgatcctttacacagagcagacatgaaacactctttttgtggaatttgcaggtggagatttcagccgctttgaggtcaatggtagaataggaaatatcttcctatagaaactagacagaatgattctcggaaactcctttgtgatgtgtgcgttcaactcacagagtttaacctttcttttcatagagcagttaggaaacactctgtttgtaaagtctgcaagtggatattcagacctctttgaggccttcgttggaaacgggtttttttcatataaggctagacagaagaattctcagtaacttccttgtgttgtgtgtattcaactgacagagttgaactttcatttagagagagcagatttgaaacactctttttgtggaatttgcaagtggagatttcaagcgctttggggccaaaggcagaaaacgaaatatcttcgtataaaaactagacagaatcattctcagaaactgctctgcgatgtgtgcgttcaactctcagagtttaacttttcttttcattcagcagtttggaaacactctgtttgtaaagtctgcacgtggataatttgaccacttagaggccttctttggaaacgggttttttttcatataaggctagacagaagaattcccagtaacttccttgcgttgtgtacattcaactcacagagttgaacgttcccttagacagagcagatttgaaacactctttttgtgcaattggcaagtggagatttcaagcgctttaaggtcaatggcagaaaaggaaatatcttcgtttcaaaactagacagaatcattcccacaaactgcgttgtaatgtgtgcgttcaactcacagagtttaacctttcttttcatagagcagttaggaaacactctgtttgtaaagtctgcaagtggatattcagacctctttgaggccttcgttggaaacgggatttcttcgtattctgctagacagaggaattctcagtaacttccttgtgttgtgtgtattcaactcacagagttgaacgatcctttacacagagcagacttgaaacactctttttgtggaatttgcaagtggagatttcagccgctttgaggtcaatggtagaataggaaatatcttcctatagaaactagacggaaatgattctcagaaactcctttgtgatgtgtgtgttcaactcacagagtttaacctttcttttcatagagccgttaggaatcactctgtttgtaaagtctgcaagtggatattcagacctctttgaggccttcgttggaaacgggtttttttcatataaggctagacagaagaattctcagtaacttccttgtgttgtgtgtgttcaactcacagagttgaactttcatttacacagagcagatttgaaacactctttttgtggaatttgcaagtggagatttcaagcgctttgaggccaaaggcagaaaaggaaatatcttcgtataaaaactagacagaatcattctcagaaactgctgcgtgatgtgtgagttcaactctcagagtttaacttttcttttcattcagcggtttggaaacagtctgtttgtaaagtctgcacgtggatattttgaccacttagaggccttcgttggaaacgggattttttcatgtaaggctagacagaagaattcccagtaacttccttgtgttgtgtgcattcaactcacagagttgaacgttcccttagacagagcagatttgaaacactctatttgtgcaatttgcaagtgtagatctcaagcgctttaaggtcaatgggagaaaaggaaatatcttcgtttcaaaactagacagaatcattcccacaaactgcgttgtgatgtgttcgttcaactcacagagtttaaactttctgttcatagagcagttaggaaacactctgtttgtaaagtctgtaagtggatattctgacatcttgtggccttcgttggaaacgggatttcttcatattctgctggacagaagaattctcagtaacttccttgtgttgtgtgtattcaactcacagagttgaacgatcctttacacagagcagacttgaaacactctttttgtggaatttgcaagtggagatttcagccgctttgagttcaatggtagaataggaaatatcttcctatagaaagtacacagaatgattctcagaaactcctttgtgatgtgtgcattcaactcacagagtttaacctttcttttcatagagcagttaggaaacactgtttgtaaagtctgcaagtggatattcagacctccttgaggccttcgttggaaacgggatttcttcatattatgctagacagaagaattctcagtaacttccttgtgttgtgtgtattcaactgacagagttgaactttcatttagagagagcagatttgaaacactgtttttgtggaatttgcaagtggagatttcaagcgctttggggccaaaggcagaaaagaaaatatcttcgtataaaaactagacagaatcattctcagaaactgctctgcgatgtgtgcgttcaactctcagagtttaacttttcttttcattcagcagtttggaaacactctgtttgtaaagtctgcacgtggataatttcaccacttagaggtcttcgttggaaacgggtttttttcatgtaaggatagacagaagaattctcagtaacttccttgtgttgtgtgtattcaactcacagagttgaacgatcctttacacagagcagacttgtaacactctttttgtggaatttgcaagtggagatttcagccgctttgaagtcacaggtagaaagggaaatatcttcctataaacactagacagagtgattctcagaaacttctttgtgatgtctgcgttcaactgacagagtttaacctttcttttcatagagcagttaggaaacactctgtttgaaaagtctgcaagtggatactcagacctccttgaggccttcgttggaaacgggatttcttcatattatgctagacagaggaattctcagtaacttccttgtgttgtgtgtattcaactcacagagttgaacgatcctttacacagagcagacttgaaacactctttttgtggaatttgcaagtggagatttcagccgctttgaggtcaatggtagaataggaaatatcttcctacagaaactagacagaatgattctcagaaactcctttgcgatgtgtgcgttcaactcacagagtttaacctttcttttcatagagcagttaggaaacactctgtttgtaaagtctgcaagtggatattcagacatctttgaggctttcgttggaaacgggatttcttcatattctgctagacagaagaattctcagtaacttccttgtgttgtgtgtattcaagctgacagagttgaactttcatttagagagagcagatttgaaacactgtttttgtggaatttgcaaatggagatttcaagcgctttgggaccaaaggcagaaaaggaaatatcttcgtataaaaactagacagaatcattctcagaaactgctgcgtgatgtgtgcgttcaactctcagagtttaacttttcttttcattcagcggtttggaaacactctgtttgtaaagtctgcacgtggaaattttgaccacttagaggccttcgttggaaacgtgtttttttcatgtaaggctagacagaagaattcccagtaacttccttgtgttgtgtgcattcaactcacagagttgaacgttcccttagacagagcagatttgaaacactctatttgtgcaatttgcaagtgtagttttcaagctctttaaggtcaacggcagaaaaggaaatatcttcgtttcaaaactagacagactcattcccaaaaactgcgttgtgatgtgttcgttaaactcacagagtttaacctttctgttcatagagcagttaggaaacactctgtttgtaaagtctgtaagtggaaattctgacatcttgtggccttcgttggaaacgggatttcttcatattatgctagacagaagaattctcagtaacttccttgtgttgtgtgtattcaactcacagagttgaacgatcctttacacagagcagacttgaaacactctttttgtggaatttgcaagtggagatttcagctgctttgaggtcaatggtagaataggaaatatcttcctatagaaactagacagaatgattctcataaactcctttgtgatgtgtgcgttcaactcacagagtttaacctttcttttcatagagcagttaggaaacactctgtttgtaaagtctgcaagtggatattcagacatccttgaggctttcgttggaaacgggatttcttcatattctgctagaaagaagaattctcggtaacttccttgtgttgtgtgtattcaactgacagagttgaactttcatttagagagagcagatttgaaacactgtttttgcggaatatgcaagtggagatttcaagcgctttggggccaagggcagaaaaggaaatatcttcgtttaaaaactagacagaatcattctcagaaactgctgcgtgatgtgtgcgttcaactctcagagtttaacttttcttttcattcagtggtttggaaacactctgtttgtaaagtctgcacgtggatattttgaccacttagaggctttcgttggaaacgggtttttttcatgtaaggctagacagaataattcccagtaacttctttgtgttgtgtacattcaactcacagagttgaacgttcccttagacagagcagatttgaaacactctttttgtggaattggcaagtggagatttcaagcgctttaaggtcagtggcagaaaaggaaatatcttcgtttcaaaactagacagaatcattcccaaaaactgcgttgtgatgtgttccttcatctcagagagtttaacctttcttttcagagagcagttaggaaacagtctgtttgtaaattctgtaagtggatattctgacatcttgtggccttcgttggaaacgggatttcttcatattctgctagacagaagaattctcagaatcttccttgtgttgtgtgtattcaactcacagagttgaacgatggtttactcagagcagatttgaaacactctttttgtggaatttgcaagtggagatttcagccgctttgaggtcaatggtagaaaaggaaatatcttcgtataaaaactagacagaatgattctcagaaactcctttgtgatgtgtgcgttcaactcacagagtttaacttttcttttcatagagcagttaggaaacactctgtgtgtaaagtctgcaagtggatattcagacctctttgaggccttcgttggaaacgggatttctccatattatgctagacagaagaattctcagaatcttccttgtgttgtgtgtattcaacgcacagagttgaacgatcctttacacagagcagacttgaaacactctttttgtggaatttgcaagtggagatttcagccgctttgaggtccatggtagaaaaggaaatatcttcgtataaaaactagacagaatgattctcagaaactccttggtgatgtgggcgttcaactcacagagtttaacctttcttttcatagagccgttaggaaacactctgtttgtaaagtctgcacgtggatatttggacttctttgaggccttcgttggaaacgggtttttttcatgtaaggctagacggaagaattctcagtaacttccttgtgttgtgtgtattcaactgacagagttgaactttcatttagagagagcagatttgaaacactgtttttgtggaatttgcaagtggagatttcaagcgctttggggccaaaggcaggaaaggaaatatcttcgtataaaaactagacagaatcattctcagaatctgctgcgtgatgtgtgcgttcaactctcagagtttaacttttcttttcattcagcggtttggaaacactctgtttgtaaagtctgcacgtggatattttgaccacttagaagccttctttggaaacggtttttcttcatgtaaggctagacagaagaattcccagtaacttccttgtgttgtgtgcattcaactcacagagttgaacgttcccttagacagagcagatttgaaacactctatttgtgtaatttgcaagtgtagatttcaagcgctttaaggtcaacggcagaaaaggaaatatcttcgtttcaaaattagacaggatcattcccacaaactgcgttgtgatgtgttcgttcaactcacagagtttaacctttcttttcatagagaagttaggaaacactctgtttgtaaagtctgcaagtggatattcagacttccttgaggccttcgttggaaacgggatttcttcatattctgctagacagaagaattctcagtaacttccttgtgttgtgtgtattcaactcacagatttgaatgatcctttacacagagcagacttgaaacactctttttgtggaatttgcaagtggagatttcagccgctttgagttcaatggtagaataggaaatatcttcctatagaaactagacagaatgattctcagaaactcctttgtgatgtgtgcgttcaactcacagagtttaacctttcttttcatagagcagttaggaaacactctgtttgtaaagtcagcaactggatattcagacctccttgtggccttctttggaaacgggatttcttcatattatgctagacagaagaattctcagtaacttccttgtgttgtgtgtattcaactgacagagttgaactttcatttggagagagcagatttgaaacactgtttttgtggaatttgcaagtggagatttcaagcgctttggggccaaaggcagaaaaggaaatatcctcgtataaaaacaagacagaatcattctcagaaactgctgcgtgatgtgtgcgttcaactctcagagtttaacttttcttttcattcagcggtttggaaacactctgtttgtaaagtctgcacgtggatattttgaccacttagaggtcttcgttggaaacgggttttttttaatgtaaggctagacagaagaattcccagtaacttccttgtgttgtgtgcattcaactcacagagttgaacgttcccttagacagagcagatttgaaacactctatttgtgcaatttgcaagtgtagttttcaagctctttaaggtcaacggcagaaaaggaaatatcttcgtttcaaaactagacagaatcattcccacaaactgcgttgtgatgtgttcgttcaactcacagagtttaacctttcttttcatagagcagttaggaaacagtctgtttgtcaattctgtaagtggatattctgacatcttgtggccttcgttggaaacaggatttcttcatattctgctagacagaagaattctcagtaacttccttctgttgtgtgtattcaactcacagagttgaacgatcctttacacagagcagacttgaacacaactctttttgtggaatttgcaagtggagatttcagccgctttgaggtcaatagtagaaaaggaaatatcttcgtagaaaaactagacagaatgattctcagaaacttctttgtgatgtgtgcgttcaactcacagagtttaacctttcttttcatagagcagttaggaaacactctgtttgtaaactctgcaagtggatgttcagacctctttgaggccttcgttggaaacgggatttcttcatactatgctagacagaagaattcccagtaacttccttgtgttgtgtgtgttcaactcacagagttgaactttcatttacccagagcagattcgaaacactctttttgtggaatttgcaagtggagatttcaagcgctttgaggccaaaggcagaaaaggaaatatcttcgtttcaaaactagacagaatcattctcagaaactgctctgcgatgtgtgcgttcaactctcagattttaacttttcttttcattcagcagtttggaatcactctgtttgtaaagtctgcacgtggatattttgaccacttagaggccttcgttggaaacgggtttttttcctgtaaggctagacagaagaattcccagtaacttccttgcgttgtgtacattcaactcacagagttgaacgttcccttagacagagcagatttgaaacactctttttgtgcaattggcaagtggagatttcaagcgctttaaggtcaatggcagaaaaggaaatatcttcgtttcaaaactagacagaatcattcccacaaactgcgttgtgatgtgttcgttcatctcacagagtttaacctttcttttcatagagcagttaggaaacactctgtttgtaaattctgtaagtggatattctgacatcctggtggccttcgttggaaacgggatttcttcatattctgctagacagaagaattctcagaaacttccttgtgttgtgtgttttcaactcacagagttgaacgatcctttacacagagcagacttgaaacactccttttgtggaatttgcaagtggagatttcagccgctttgaggtcaatggcagaataggaaatatcttcctatagaaactagacagaatgattctcagaaactcctttgagatgtgtgtgttcaactcacagagtttaacctttcttttcatagagcagttaggaaacactctgtttgtaaagtctgcaggtggatattcagacctctttgaggccttcgttggaaacgggtttttttcatataaggctagacagaagaattcccagtaacttccttgtgttgtgtgtgttcaactcacagagttgaactttcatttacagagagcaggtttgagacacactttttgtggaatttgctaatggagatttcaagcgctttgaggccaaaggcagaaaaggaaatatcttcgtataaaaactagacagaatcattctcagaaactgctgcgtgatgtgtgcgttcaactctcagagtttaacttttcttttcattcagcggtttggaaacactctgtttgtaaagtctgcacgtggatattttgaccacttagaggccttcgttggaaacgggtttttttcatgtaaggctagtcagaagaattctcagtaactgccttgtgttgtgtttattcaactcacagagttaaacgatcctttacacagagcagacttgaaatactctttttgtggaatttgcaagtggagatttcagccgctttgaggtcaatggtagaataggaaatatcttcctatagaaactagacagaatgattctcagaaactcctttgtgatgcgtgcgttcaactcacagagtttaacctttcttttcatagagcagttaggaaacactctgtttgtaaagtctgcaagtggatattcagacatccttgaggctttcgttggaaacgggatttcttcgtattctgctagaaagaagaattctcagtaacttccttgtgttgtgtgtattcaactcacagagttgaacgatcctttacacagagcagacttgaaacactctttttgtggaatttgcaagtggagatttcagccgatttgaggtcaatggtagaaaaggaaatatcttcgtataaagactagacagaatgattctcagaaactcctttgtgatgtgtgcgttcaactcacagagtttaacctttcttttcatagagcagttaggaaacactctgtttgtaaagtctgcaagtggatattcagacctccttaaggccttcgttggaaacgggatttcttcatattatgctagacagaagaattctcagtaacttccttgtgttgtgtgtattcaactcacagagttcaacgatcctttacacagagcagacttgaaacactctttttgtggaatttgcaagtggagatttcagccgctttgaggtcaatggtagaataggaaatatcttcccatagaaactagacagaatgattctcacaaactcctttgtgatgtgtgcgttcaactcacagagttaaacctttcttttcatagagcagttaggaaacactctgtttgtaaagtctgcaagtggatattcagacctccttgaggccttctttggaaaggggatttcttcatattatgctagacagaagaattctcagaaacttccttgtgttgtgtgtattcaactctcagagttgaacgaccctttacacagagcagacttgaaacactctttttgcggaatttgcaagtggaggtttcagccgctttgaggtcaatggtagaaaaagaaatatcttcgtatgaaaactagacagaatgattgtcagaaactcctttgttatgtgggcatttaactcacagagtttaaccgttcttttcatagagcagttaggaaacactctgtttgtaacgtctgcaagtggatattcagacatatttgaggccttctttggaaacgggatttcttcatattatgctacacagaagaattctcagtaacttccttgtgttgtgtgtattcaactcacagagttgaaggatcctttacacagagcagtcttgaaatactctttttgtggaatttacacgtggagatttctgccgctttgatgtcaatggtagaataggaaatatcttcgtatagaaactagacagaatgattctcagaaactcctttgtgatgtgtgcgttcaactcacagtgtttaacctttcttttcatagagcagttaggaaacactctgtttgtaaagtctgaaagtggatattcagacctctttgaggccttcgttggaaacgggtttttttcatataaggctagacagaagaattctcagtaacttccttgtgttgtgtgtattcaaatgacagagttgaactttcatttagagagagcagatttgaaacactgtttttgtggaatttgcaagtggagatttcaagcgctttggggccaaaggcagaaaaggaaatatcttcgtataaaaactagacagaatcattctcagaaactcctgcgtgatgtgtgcgtccaactctcagagtttaacttttcttttcattcagcggtttggaaacactctgtttgtaaagtctgcacgtggatattttgaccacttagaggccttcgttggaaacgggtttttttcatgtaaggctagacagaagaattcccagtaacttcccttgtgttgggtgcattaaactcacagagttgaacgttcccttagacagagcagatttgaaacactctatttgtgcaatttgcaagtgtagatttcaagcgctttaaggtcaatggcagaaaaggaaatatcttcgtttcaaaactagacagaatcattcccacaaactgcgttgtgatgtgttcgttcaactcacacagtttaacctttctgttcatagagcagttaggaaacactctgtttgtaaagtctgtaagtggatattctgacatcttgtggccttcgttggaaacgggatttcttcatattctgctagacagaacaattctcagtaacttccttgtgttgtgtgtattcaacttacagagttgaacgattctttacacagagcagacttgaaacactctttttgtggaatttgcaagtggagatttcagccgctttgaggtcaatggtagaaaaggaaatatcttcgtataaagactagacagaatgattctcagaaactcctttgtgatgtgtgcgttcaactcacagagtttaacctttcttttcatagagcagttgggaaacactctgtttgtaaagtctgcaagtggatattcagacctccttgaggccttcgttggaaatgggatttcttcatattatgctagacagaagaattctcagtaacttccttgtgttgtgtgtattcaactgacagagttgaactttcatttagagagagcagatttgaaacactgtttttgtggaatttgcaagtggagatttcaagagctttggggccaaaggcagaaaaggaaatgtcttcgtataaaaactagacagaatcattctcagaaactgctctgcgatgtgtgcgttcaactctcagagtttaaattttcttttcattcagcagtttggaaacactctgtttgtaaagtctgcacgtggatattttgaccacttagaggccttcgttggaaacgggtttttttcctgtaaggctagacagaagaattcccagtaacttccttgtgttttgtacattcaacccacagagttgaacgtttccttagacagagcagatttgaaacactttttgtgcaattggcaagtggtgatttcagccgctttgaggtcaaaggtagaaaaggaaatatcttcctataaaaactagacagaatcattcccacaaactgcgttgtgatgtgttcgttcaactcacagagtttaacctttcttttcatagagcagttaggaaacactctgtttgtaaactctgcaagtggatattcagacctctttgaggccttcgttggaaacgggatttctccatactgtgctagacagaagaattctcagtaacttccttgtgttgtgtgtattcaactcacagagttgaacgatcctttacacagagcagacttgtaacactctttttgtggaatttgcaagtggagatttcagccgctttgaagtcaaaggtagaaaaggaaatatcttcctataaaacctagacagaatgattctcataaactcctttgtgatgtgtgcattcaactcacagagtttcacctttcttttcatagagcagttaggaaacactctgtttgtaaagtctgcaagtggatattcagacctccttgaggccttcgttggaaacgggatttcttcttattctgctagacagaagaattccccagtaacttccttgtgttgtgtgtgttcaactcacagagttgaactttcatttacacagagcagatttgaaacactctttttgtggaatttgcaggtggagatttcaagcgctttgaggccaaaggcagaaaaggaaatatcttcgtataaaaactagacagaatcattctcagaaactgctgcgtgatgtgtgcgttcaactctcagagtttaacttttcttttcattcagcggtttggaaacactctgtttgtaaagtgtgcacgtggaaattttgaccacttagaggccttcgttggaaacgggtttttttcatgtaaggctagacagaagaattcccagtaacttcccttgtgttgtgtacattcaactcacagagttgaacgttcccttagacagagcagatttgaaacactctttttgtgcaattggcaagtggagatttcaagcgctttgaggtcaatggcagaaaaggaaatatcttcgtttcaaaactagacagaatcattcccacaaactgcgttgtgatgtgttcgttcaactcacagagtttaacttttctgttcatagagcagttagaaaacactctgtttgtaaagtctgcaagtggatattcagacctccttgaggccttcgttggaaacgggatttcttcatattctgctagacagaagaattctcagtaacttccttgtgtggtgtgtattcaactcacagagttgaacgatcctttacagagagcagacttgaaacactctttttgtgaaatttgcaagtggagatttcagccgctttgaggtcaatggtagaataggaaatatcttcctatagaaactagacagaatgattctcagaaactcctttgtgatgtgtgtgttcaactcacagagtttaacctttcttttcatagaacagttcgtaaacactctgtttataaagtctgcaagtggatattcagacccctttgaggccttcgttggaaacgggatttcttcatattatgctagacagaagaattctcagtaactttccttgtgttgtgtgtattcaactgacagagttgaactttcatttagagagagcagatttgaaacactgtttttgtggaatttgcaagtggagatttcaagcgctttggggccaagggcagaaaaggaaatatcttcgtataaaaactagacagaatcattctcagaaactgctctgcgatttgtgcgttcaactctcagagtttaactttccttttcattcagcagtttggaaacactctgtttgtaaagtctgcacgtggataatttgaccacttagaggccttcgttggaaacgggtttttttcatgtaaggctagacagaagaattctcagtaacttctttgtgttgtgtgtattcaactcacagagttgaacgatcctttacacagagcagacttgtaacactctttttgtggaatttgcaagtggagatttcagccgctttgaagtcaaaagtagaaaaggaaatatcttcctataaaaactagacagaatcattcccacaaactgcgttgtgatgtgttcgttcaactcacagagtttaacttttctgttcatagagcagttagaaaacactctgtttgtaaagtctgcaagtggatattcagacctccttgaggccttcgttggaaacgggatttcttcatattctgctagacagaagaattctcagtaacttccttgtgttgtgtgtattcaactcacagagttgaacgatcctttacacagagcagacttgaaacactctttttgtggaatttgcaagtggagatttcagccgctttgaggtcaatagtagaaaaggaaacatcttcgtagaaaaactagacagaatgattctgagaaatcctttgtgatgtgtgcgttcaactcacagagtttaacctttcttttcatagagcagttaggaaacactctgtttttaaagtcttcaagtggatattcagacctccttgaggccttcgttggaaacgggatttcttcatattatgctagacagaagaattcccagtaacttccttgtgttgtgtgtgttcaactcacagagttgaactttcatttacacagagcagatttgaaacactctttttgtggaatttgcaagtggagatttcaagcgctttgaggctaaaggcagaaaaggaaatatcttcgtataaaaactaggcagaatcattctcagaaactgctctgcgatgtgtgcgttcaactctcagagtttaacttttcttttcattcagcaatttggaaacactctgtttgtaaagtctgcacgtggatattttgaccacttagaggccttcgttggaaacgggtttctttcctgtaaggctagacagaagaattcccagtaacttccttgcgttgtgtacattcaactcacagagttgaacgttcccttagacagagcagatttgaaacactctttttgtgcaattggcaagtggagatttcaagcgctttaaggtcaatggcagaaaaggaaatatcttcgtttcaaaactagacagaatgattctcagaaactcctttgtgatgtgtgcgttcaactcacggagtttaacctttcttttcatagagcagttaggaaacactctgtttgtaaagtctggaagtggatattcagacatctttgaggctttcgttggaaacgggatttcttcatattctgctatacagaagaattgtcagaaacttccttgtgttgtgtgtcttcaactcacagagttgaacgatgctttacacagagtagacttgaaacactctttttctggaatttgcaagtggagatttcagccgctttgaggtcaatggtagaaaaggaaatatcttcgtataaaaactagacagaatgtttctcagaaactcctttgtgatgtgggcgttgaactcacagagtttaacctttcttttcatagagcagttaggaaacactctgtttgtaacgtctgcaggtggatatttggacttctttgaggtcttcgttggaaacgggtttttttcatgtaaggctagacagaagaattcccagtaacttcccttgtgttgtgtgtgttcaactcacagagttgaactttcatttacacagagcagatttgaaacactctttttgtggaatttgcaagtggagatttcaagcgctttgaggccaaaggcagaaaaggaaatatcttcgtataaaaactagacagaatcattctcagaaactcctttgtgatgtgtgcgttcaactctcagagtttaacttttcttttcattcagcggtttggaaacactctgtttgtaaagtctgcacgtggatattttgaccacttagaggccttcgttggaaacgggtttttttcatgtaaggctagacagaagaattctcagtaactttccttgtgttgtgtgtattcaactcacagagttgaacgatcctttacacagagcagacttgtaacactctttttgtggaatttgcaagtggagatttcagccgctttgaagtcaaaggtagaaaaggaaatatctccctataaaaactagacagaatgattctcagaaacttcttggtgatgtgtgcgttcaactcacagagtttaacctttcttttcatagagcagttaggaaacactctgtttgtaaactctgcaagtggatattcagacctccttgaggccttcgttggaaacgggatttcttcatactgtgctagacagaagaattctcagtaacttccttgtgttgtgtgtattcaactcacagagttgaatgatcctttacacagagcagacttgaaacactctttttgtggaatttgcaagtggagatttcagccgcgttgaggtcaatggtagaagaggaaatatcttcgtataaaaactagacagaatgattctcagaaactcctttgtgatgtgtgcgttcaactcacagagtttaacttttcttttcatagagcagttaggaaacattctgtttgtaaagtctgcaagtggatattcagacctctttgaggccttctttggaaacgggatttcttcatattatgctagacagaagaattctcagtaacttccttgtgttgtgtgtattcaactgacagagttgaactttcatttagagagagcagatttgaaacactgtttttgtggaatttgcaagtggagatttcaagggctttggggccaagggcagaaaaggaaatatcttcgtataaaaactagacagaatcattctcagaaactgatgcgtgatgtgtgcgttcaactctcagagtttaacttttcttttcattcagcggtttggaaacactctgtctgtaaagtctgcacgtggatattttgaccacttagaggccttcgttggaaacgggtttttttcatgtaaggctagacagaagaattcccagtaacttccttgtgttgtgtacattcaactcacagagttgaactttcccttagacagagcagacttgtaacactctttttgtggaatttgcaagtggagatttcagccgctttgaagtcaaaggtagaaaaggaaatatcttcctataaaaactagacagaatgattctcagaaactcctttgtgatgtgtgcgttcaactcacagagtttaacctttcttttcatagagcagttaggaaacactctgtttgtaaagtctgcaaggggataatcagacctctttgaggccttcgttggaaacgggatttcttcgtattctgctagacagaagaattctcagtaacttcctcgtgttgtgtgtattcaactcacagacttgaacgatcctttacacagagcagacttgaaacactctttttgtggaatttgcaaatggagatttcagccgctttaagatcaatggttgaaaaggaaatatcttcatataaaaattagacagaatgattctcagaaactcctttgtgatgtgtgtgttcaactcacagagtttcacctttcttttcatagagcagttaggaaacactctgtttgtaaagtctgcaagtggacattcagacctccttgaggccttcgttggaaacgggatttcttcatattctgctagacagaagaattctcaataacttccttgtgttgtgtgtattcaactcacagagttgaacgatcctttacacagagcagacttgaaacactctttttgtggaatttgcaagtggagatttcagccgctttgagttcaatggtagaataggaaatatcttcctatagaaactagacagaatgattctcagaaacttctttgtgatgtgtgcgttcaactcacagagttaaaactttcttttcatagagcagttaggaaacactctgtttgtaaagactgcacgtggatattcagacctctttgaggccttcgttggaaacgggtttttttcctgtaaggctagacagaagaattctcagtaacttccttgtgttgtgtgtattcaactgacagagttgaactttcatttagagagagcagatttgaaacactgtttttgtggaatttgcacttggagatttcatgcgctttggggccaatggcagaaaaggaaatatcttcgtataaaaactagacagaatcattctcagaaactgctgcgtgatgtgtgcgttcaactctcagagtttaacttttcttttcattcagcggtttggaaacactctgtttgtaaagtctgcacgtggatattttgaccacttagaggccttcgttggaaacgggtttttttcatgtaagggtagacagaagaattcccagtaacttccttttgttgtgtgcattcaactcacagagatgaacgttcgcttagacagagcagatttgaaacactctatttgtgcaatttgcaagtgtagatttcaagcgctttaaggtcaatggcagaaaaggaaatatcttcgtttcaaaactagacagaatcattcccacaaactgcgttgtgatgtgttcgttcaactcacagggtttaacctttctgttcatagagcagttaggaaacactctgtttgtaaagtctgtaagtggatattctgacatcttgtggccttcgttggaaacgggatttcttcatattctgctagacagaagaattctcagtaacttccttgtgttgtgtgtattcaactcacagagttcaatgatcatttacacagagcagacttgaaacactctttttgtggaatttgcaaggggagatttcagccgctttgaggtcaatggtagaaaaggaaatatcttcgtataaaaactagacagaatgattctcagaaaatcttttgtgatgtgtgcgttcaactcacagagtttaacttttcttcttatagagcagttaggaaacactctgtttgtaaagtctgcaagtggatattcagacctctttgaggccttcgttggaaacgggatttcttcatattatgctagacagaataattctcagtaacttccttgtgttgtgtgtattcaactcacagagttgaaggatcctttacagagagcaggcttgaaacactctttttgtcgaatttgcaagtggagatttctgccgctttgaggtcaatggtagaataggaaatatcttcttatagaaactagacagaatcattctcagaaactgctctgcgatgtgtgcgttcaactctcagagtttaacttttcttttcattcagcagtttggaaacactctgtttgtaaagtctgcacgtggatattttgaccacttagaggccttcgttgcaaacgtgtttttttcctgtaaggctagacagaagaattcccagtaacttccttgtgttgtgtacattcaactcacagagttgaacgttcccttagacagagcagatttgaaacactctttttgtgcaattggcaagtggagatttcaagcgctttaaggtcaaaggcagaaaaggaaatatcttcgtttcaaaactagacagaatgattctcagaaactcctttgtgatgtgtgcgttcaactcacacagtttaacctttcttttcatagagcagttaggaaacactgtttgtaaagtctgcaagtggatattcagacctccttgaggccttcgttggaaacgggatttcttcatattctgctagacagaagaattctcagtaacttccttgtgttctgtgtattcaactcacagagttgaacgatcctttacacagagcagacttgaaacagtctttttgtggaatttgcaagtggagacttcagccgctttgaggtcaatggtagaataggtaatatcttcctatagaaactagacagaatgattctcagaaactcctttgtgatgtgtgcgttcaactcacagagtttaacttttcttttcatagagcagttaggaaacactctgtttgtaaagtctgcaagtggatattcagacctctttgaggccttcgttggaaacgggatttcttcatattctgctagacagaataattctcagtaacttccttgtgttgtgtgtattcaactcacagagttgaacgatcctttacacagagcagacttgaaacattctttttgtggaatttgcaagtggagatttctgccgctttgaggtcaatggtagaataggaaatatcttcctatagaaactagacagaatgattctcagaaactcctttgtgatgtgtgcgttcaactcacagagtttaacctttcttttcattcaccagtttgggaaacactctgtttgtaaagtctgcacgtggatattttgaccacttagaggccttcgttggaaacgggtttttttcctgtaaggctagacagaagaattcccagtaacttccttgtgttgtgtgcattcaactcacagagttgaacgttcccttagacagagcagatttgaaacactctatttgtgtaatttgcaagtgtagatttcaagcgctttaaggtcaacggcagaaaaggatatatcttcgtttcaaaactagacagaatcattcccacaaactcgttgtgatgtgttcgttcaactcacagagtttaacctttctgttcatagagcagttaggaaacactctgtttgtaaagtctgcaagtggatattcagacctccttgaggccttcgttggaaacgggatttcttcatattctgctagacagaagaattctcagaaacttccttgtgttgtgtgtattcaactcacagatgtgaacgatcgtttacacagagcagacttgagacactctttttgtggaatttgtaagtggagatttcagccgctttgaggtcaatggtagaaaaggaaatatcttcatataaaaactagacagaacgattctcagaaactcctttgtgatgtgtgcgttcaactcacagagtttaacctttctgttcatagagcagttaggaaacactctgtttgtaaagtctgcaagtggatattcagacctccttgaggccttcgttggaaacgggatttcttcatattctgctagacagaagaattcccactaacttccttgtgttgtgtgtgttcaactcacagagttgaactttcatttacacagagcagatttgaaacactcattttgtggaatttgcaagtggagatttcaagcgctttgaggccaaaggcagaaaaggaaatatcttcgtataaaaactagacagaatcattctcagaaactgctctgcgatgtgtgcgttcaactctcagagtttaacttttcttttcattcagcagtttggaaacactctgtttgtgaagtctgcacgtggatattttgaccacttagaggccttcgttggaaacgggtttttttcctgtaacgctagacagaagaattcccagtaacttccttgtgttgtgtgcattcaactcacagagttgaacgttcccttagacagagcagatttgaaacactctatttgtccaatttgcaagtgtagatttcaagcgctttaaggtcaacggcagaaaaggaaatatcttcgtttcaaaactagacagaatgattctcagaaacttcattgtgatgtgtgtgtgcaactcacagagtttaacctttcttttcatagagcagttgggaaacagtctgtttgtaaattctgtaagtggatattctgacatcttgtggccttcgttggaaacgggatttcttcatattctgctagacagaagaattctcagtaacctccttgtgttgtgtgtattcaactcacagagttgaacgatcctttacacagagcagacttgaaacactcttttcgtggaatttgcaagtggagatttcagccgctttgagatcaatggtagaaaaggaaatatcttcgtataaaaactagacagaatgattctcataaactcatttgtgatgggtgcgttcaactcacaaagtttaacttttcttttcatagagcagttaggaaacactctgtttgtaaagtctgcaagtggatattcagacctctttgaggccttcgttggaaacgggatttcttcatattatgctagacagaataattctcagtaacttccttgtgttgtgtgtattcaactcacagagttgaacgatcctttacacagagcagacttgaaacattctttttgtggaatttgcaactggagatttcagccgctttgaggtcaatggtagaataggaaatatcttcctacagaaactagacagaatcattctcagaaactgctgcgtgatgtgtgcgttcaactctcagagtttaacttttcttttcattcagcggattggaaacactctgtttgtaaagtctgcacgtggatattttgaccacttagaggccttcgttggaaacgggtttttttcatgtaaggctagacagaagcattcccagtaacttccttgtgttgtgtgcattcaactcacagagatgaacgttcccttagacagagcagatttgaaacactctatttgtgcaatttgcaagtgtagatttcaagcgctttaaggtcaacggcagaaaaggaaatatcttcgtttcaaaactagacagaatcattcccacaaactgcgttgtgatgtgttcgttcaactcacagagtttaacctttctgttcatagagcagttaggaaacactctgtttgtaaagtctgtaagtggatattcggacatcttgtggccttcgttggaaacgggatttcttcatattctgctagacagaagaattctcagtaacttccttgtgttgtgtgtattcaactcacagagttgaacgatcctttacacagagcagacttgaaacattctttttgtggaatttgcaagtggagatttcagccgctttgaggtcaatagtagaaaaggaaatatcttcgtagaaaaactaggcagaatgattctcagaaactcctttgtgatgtgtgcgttcaactcacagagtttaacctttcttttcatagagcagttaggaaacactctgtttgtaaagtctggaagtggatattcagacctccttgaggccttcgttggaaacgggatttcttcatattatgctagacagaagaattctcagtaacttccttgtgttgtgtgtattcaactcacagagttgaactttcatttagagagagcagatttgaaacactgtttttgtggaatttgcaagtggagatttcaagcgctttggggccaaaggcagaaaaggaaatatcttcgtataaaaactagacagaatcattctcagaaactgctgcgtgatgtgtgcgttcaactctcagagtttaacttttcttttcattcagcggtttggaaacactctctttgtaaagtctgcacgtggaaattttgaccacttagaggccttcgttggaaacgggtttttttcatgtaaggctagacagaagaattcccagtaacttccttgtgttgtgtacattcaactcacagagttgaacgttcccttagaccgagcagatttgaaacactctttttgtgcaattggcaagtggagatttcaaccgctttaaggtcaatggcagaaaaggaaatatcttcgtttcaaaactagacagaatcattcccacaaactgcgttgtgatgtgttcgttcatctcacagagtttaacctatcttttcatagagcagttaggaaacactctgtttgtaaattctgtaagtggatattctgacatcttgtggccttcgttggaaacgggatttcttcatattctgctagacagaggaattctcagtaacttccttgtgttgtgtgtattcaactcacagagttgaacgatcctttaaacagagcagacttgaaacactctttttgtggaatttgcaagtggagatttcagccgctttgagttcaatggtagaataggaaatatcttcctatagaaactacacagaatgattctcagaaaatcctgtgtgatgtgtgcgttcaactcacagagtttaacttttcttttcatagagcagttaggaaacactctgtttgtaaagtctgcaagtggatattcagacgtctttgaggccttcgttggaaacgggatttcttcatattctgccagacagaataattctcagtaacttccttgtgttgtgtgtattcaactcacagagttgaaggatcctttacagcgagcaggcttgaaacactctttttgtcgaatttgcaagtggagatttcagccgctttgaggtcaatggtagaataggaaatatcttcttatagaaactagacaaaatcattctcagaaactgctcggtgatgtgtgcgttcaactctcagagtttaacttttcttttcattcagcagtttggaaacactatgtttgtaaagtctgcacgtggatattttgacctctgagaggccttcgttggaaacgggtttttttcatgtaaggctagacagaagaattctcagtaacttccttgtgttgtgtgtattcaactcacagagttgaacgatcctttacacagagcagacttgtaacactctttttgtggaatgtgcaagtggagatttcagccgctttgaagtcaaaggtagaaaaggaaatatcttcctataaaaactagacagaatgattctcagaaactcctttgtgatgtgtgtgttcaactcacagagtttaacctttcttttcatagagcagttagtaaacactctgtttataaagtctgcaagtggatattcagaccccttgaggccttcgttggaaacgggatttcttcacattgtgctagacagagaattctcagtaacttccttgtgttgtgtgtattcaactcacagagttgaacgatcctttacacagagcagacttgaaacactctttttgtggaatttgcaagtggagatttcagccgctttgaggtcaatagtagaaaaggaaatatcttcgtagaaaaactaggcagaatgattctcagaaactcctttgtgatgtttgtgttcaactcacagagtttaacctttcttttcatagagcagttagtaaacactctgtttataaagtctgcaagtggatattcagtcccctttgaggccttcgttggaaacgggatttcttcatattatgctagacagaagaattctcagtaacttccttgtgttgtgtgtattcaactcacagagttgaactttcatttagagagagcagatttgaaacactgtttctgtggaatttccaagtggagatttcaagcgctttggggccaaaggcagaaaaggaaatatcttcgtataaaaactagacagaatcattctcagaaactgctgcgtgatgtgtacgtttaactctcagagtttaacttttcttttcattcagcggtttggaaacactctgtttgtaaagtctgcacgtggatattttgaccacttagaggccttcgttggaaacgggtttttttcatctaaggttagacagaagaattcccagtaacttccttgtgttgtgtacattcaactcacagagttgaacgttcccttagacagagcagatttgaaacactctttttgtgcaattggcaaatggagatttcaagcgctttaagttcaatggcagaaaaggaaatatcttcgtttcaaaactagacagaatcattcccacaaactgccttgtgatgtgttcgttcaactcacagagtttaacctttctgttcatagagcagttaggaaacactctgtaacgtctgtaagtggatattctgacatcttgtggccttcgttggaaacgggatttcttcatattctgctagacagaagaattctcagaatcttccttgtgttgtgtgtattcaactcacacagttgaacgatggtttacacagagcagatatgaaacactctttttgtggaatttgcaagtggagatttcagccgctttgaggtcaatggtagaaaaggaaatatattcgtataaaaactagacagaatgattctcagaaacttctttgtgatgtgtgcgttcaactcacagagtttaacctttcttttcatagagcagttaggaaacactctgtttgtaaactctgcaagtggatattcagacctctgtgaggccttcgttggaaacgggatttcttcatactgtgctagacagaagaattcccagtaacttccttgtgttgtgtgtgttcaactcacagagttgaacttccatttacacagagcagatttgaaacactctttttgtggaatttgcaagtggagatttcaagcgctttgaggccaaaggcagaaaaggaaatatcttcatttcaaaactagacagaatcattctcagaaactgctgcgtgatgtgtgcgttcaactctcagagtttaactttttttttcattcagcggtttggaaacactctgtttgtaaagtctgcacgtggatattttgaccacttagaggccttcgttggaaacgggtttttttcatgtaaggctagacagaagaattcccagtaacttcccttgtgttgtgtgcattcaactcacagagttgaacgttcacttagacagagcagatttgaaacactctatttgtgcaatttgcaagtgtagatttcaagcgctttaaggtcaatggcagaaaaggaaatttcttcgtttcaaaactagacagaatcattcccacaaactgcgttgtgatgtgttcgttcaactcacagagtttaacctttctgttcatagagcagttaggaaacactctgtttgtaaagtctgtaagtgaatattctgacatcttgtggccttcgttggaaacgggatttcttcatattctgctagacagaagaattctcagtaacttccttgtgttgtgtgtattcaactcacagaagttgaacgatcctttacacagagcagacttgaaacactctttttgtggaatttgcaagtggagatttcagccgctttgaggtcaatggtagaaaaggaaatatcttcgtataaagactagacagagtgattctcagaaactcctttgtgatgtgtgcgttcaactcacagagtttaacctttcttttcatagagcagttaggaaacactctgtttgtaaagtctgcaagtggatattcagacctccttgaggtcttcgttggaaacgggatttcttcatattatgctagacagaagaattctcagtaacttccttggtgttgtgtgtattcaaatgacagagttgaactttcatttagagagagcagatttgaaacactgtttttgtggaatttgcaagtggagatttcaagcgctttggggccaaaggcagaaaaggaaatatcttcgtataaaaactagacagaatcattctcagaaactgctctgcgatgtgtgcgttcaactctcagagtttaacttttcttttcattcagcagtttggaaacactctgtttgtaaagtctgcacgtggatattttgaccacttagaggccttcgttggaaacgggttttttttctgtaaggctagacagaagaattcccagtaacttccttgtgttgtgtacattcaactcacagagttgaacgttccgttagacagagcagatttgaaacactctttttgtgcaattggcaaatggagatttcaagcgctttaagttcaatggcagaaaaggaaatatcttcgtttcaaaactagacagaatcattcccacaaactgcgttgtgatgtgttcgttcaacccacagagtttaacctttcttttcatagagcagttaggaaacactctgtttgtaaagtatgaaagtggatattctgacatcttgtggccttcgttggaaacgggatttcttcatattctgctagacagaagaattctcagtaacttccttgtgttgtgtgtattcaactcacagagttgaacgatcctttacacagagcagacttgaaacattctttttatggaatttgcaagtggagatttcagccgctttgaggtcaatggtagaataggaaatatcttcctatacaaactagacagaatgattctcagaaactcctttctgatgtgtgcgttcaactcacagagtttaacatttcttttcatagagcagttaggaaacactctgtttgtaaagtctgcaagtggatattcagacctctttgaggccttcgttggaaacgggatttcttcatattctgctagacagaagaattcccactaacttccttgtgttgtgtgtgttcaactcacagagttgaactttcatttacacagagcagatttgaaacactctttttgtggaatttgaaagtggagatttcaagcgctttgaggccaaaggcagaaaaggaaatatcttcgtttcaaaactagacagaatcattctcagaaactgctctgcgatgtgtgcgttcaactctcagagtttaacttttcttttcattcagcagtttggaaacactctgtttgtaaagtctgcacgtggataatttgaccacttagaggccttcgttggaaacgagtttttttcatgtaaggctagacagaagaattcccagtaacttccttgtgttgtgtgcattcaactcacagagttgaacgttcccttagacagagcagatttgaaacactctatttgtccaatttgcaagtgtagatttcaagcgctttaaggtcaacggcagaaaaggaaatatcttcgtttcaaaactagacagaatcattcccacaaactgcgttgtgatgtgttcgttcaactcacagagtttaacctttcttttcatagagcagttaggaaacagtctgtttgtcaattctgtaagtggatattctgacatcttgtggccttcgttggaaacgggatttcttcatattctcctagacagaagaattgtcagtaacttccttgtgttgtgtgtattcaactcacagagttgaacgatcctttacacagagcagacgtaaagcactctttttgtggaattggcaagtggagatttcagccgctttgaggtcaatggtagaaaaggaaatatcttcgtataaaaactagacagaatgattctcagaaactcctttgtgatgtgtgcgttcaactcacagagtttaacctttcttttcatagagcagttaggaaacactctgtttgtaaagtctgcaagtggatattcagacatctttcaggcgttcattggaaacgggatttcttcatattatgctagacagaagaattcccagtaacttccttgtgttgtgtgtgttcaactcacagagttgaactttcatttacacagagcagatttgaaacactctttttgtggaatttacaggtggagatttcaagcgctttgaggccaaaggcagaaaaggaaatatcttcgtataaaaactagacagaatcattctcagaaactgctctgcgatgtgtgcgttcaactctcagagtttaacttttcttttcattcagcagtttggaaacactctgtttgtaacgtctgcacgtggataatttgaccacttagaggccttcgttggaaacgggtttttttcatgtaaggctagacagaagaattcccaggaacttccttgtgttgtgtacattcaactcacagagttgaacgttcccttagacagagcagatttgaaacagtctttttgtgcaattggcaagtggtgatttcagccgctttgaggtcaatggtagaaaaggaaatatcttcgtataaaaactagacagaatgattctcataaactcctttgtgatgtatgcgttcaactcacagagtttaacctttcttttcatagagcagttaggaaacactctgtttgtaaagtctgcaagtggatattcagacctccttgaggccttcgttggaaacgggatttcttcatattctgctagaaagaagaattctcagtaacttccttgtgttgtgtgtattcaactcacagagttgaacgatcctttacacagagcagacttgaaacactctttatgtggaatttgcttgtggagatttcagctgctttgaggtcaatggtagaaaaggaaatatcttcgtataaagagtagacagaacgattctcagaaactcctttgtgatgtgtgcgttcaactcacagagtttaacttttcttttcatagagccgttaggaaacactctgtttgtaaagtctgcaagtggatattcagacctctttgaggccttcgttggaaacgggatttcttcctattctgctagacagaagaattctcagtaacttccttgtgttgtgtgtattcaactcacagagttgaacgatcctttacacagagcagacttgaaacactctttttgtggaatttgcaagtggagatttcagccgctttgaggtcaatggtagaaaaggaaatatcttcgtataaaagactagacagaatcattctcagaaactgctctgcgatgtgtgcgttcaactctcagagtttaacttttcttttcattcagcagtttggaaacactctgtttgtaaagtctgcacgtggatattttgaccccttagaggccttcgttggaaacgggtttttttcctgtaaggctagacagaagaattcccaggaacttccttgtgttgtgtgcattcaactcacaaagttgaacgttcccttagacagagcagatttgaaacactctatttgtgcaatttgcaagtgtagttttcaagctctttaaggtcaacggcagaaaaggaaatatcttcgtttcagaactagacagaatcattcccacaaactgcgttgtgatgtgttcgttcaactcacagagtttaacctttcttttcatagagcagttaggaaacactctgttgtaaattctgtaagtggatattctgacatcttggggccttcgttggaaacgggatttcttcatattctgctagacagaagaattctcagtaacttccttgtgttgtgtgtattcaactcacagagttgaacgatcctttacacagagcaaacttgaaacactctttttgtggaatttgcaagtggagatttcagccgctttgaggtcaatggtagaaaaggaaatatcttcgtataaagactagacagaatgattctcagaaactcctttgtgatgtgtgcgttcaactcacagagtttaacctttcttttcatagagcagttaggaaacactctgtttgtaaagtctgcaagtggatattcagacctctttgaggccttcgttggaaacgggttttttttcatataaggctagacagaagaattcccagtaacttccttgtgttgtgtgtgttcaactcacagagttgaactttcatttacacagagcagatttgaaacactctttttgtggaatttgcaagtggagatttcaagcggtttgaggccaaaggcagaaaaggaaatatcttcgtttgaaaactagacagaatgattctcataaactcctttgtgatgtgtgcgttcaactcacagagtttaacctttcttttcatagagcagttaggaaacactctgtttgtaaagtctgcaagtggatattcagacctgtttgaggccttcgttggaaacgggatttcttcatattctgctagacagaagaattctcagtaacttccttgtgttgtgtgtattcaactcacagagttgaacgatcctttacacagagcagacttgaaacactctttttgtggaatttgcaagtgtagatttcaagcgctttaaggtcaatggcagaaaaggaaatatcatcgtttcaaaactagacagaatcattcccacaaactgcgttgtgatgtgttcgttcaactcacagagtttaaactttctgttcatagagcagttaggaaacactgtgtttgtaaagtctgcaagtggatattcagacctctttgaggccatcgttggaaacgggatttcttcatattctgctagacagaagaattctcagaaacttccttgtgttgtgtgttttcaactcacagagttcaacgatcctttacacagagcagacttgaaacactctttttgtggaatttgcaagtggagatttcagcctctttgagatcaatggtagaataggaaatatcttcctatagaaactagacagaatgattctcagaaactcctttgtgatgtgtgcgttcaactcacacagtttaacctttcttttcatagagcagttaggaaacactctgtttgtaaagtctgcaagtggatattcagacctccttgaggcattcgttggaaacgggatttcttcatattatgctagacagaagaattctcagtaacttccttgtgttgtgtgtattcaaatcacagagttgaacgatcctttacacagagcagacttgaaacactctttttgtggaatttgcaagtggagatttcagccgctttgaggtcaatgttagaataggaaatatcttcctatagaaactagacagaatgattctcagaaaatcttttgtgatgtgtgcgttcaactcacaggagtttaacttttcttctcatagagcagttaggaaacactctgtttgtaaagtctgccagtggatattcagacctctttgaggtcttcgttggaaacgggatttcttcatattatgctagacagaagaattcccagtaacttccttgtgttgtgtacattcaactcacagagttgaacgttcccttagacagagcagatttgaaacactctttttgtgcaattggcaaatggagatttcaagcgctttaagttcaatggcagaaaaggaaatatcttcgtttcaaaactagacagaatgattctcagaaacttctttgtgatgtgtgcgttcaactcacagagtttaacctttcttttcatagagcagttaggaaacactctgtttgtaaactctgcaagtggatattcagacctctttgtggccttcgttggaaacgggatttcttcatactatgctagacagaagaattctcagtaacttccttgtgttgtgtgtattcaactcacagagttgaacgatcctttacacagagcagacttgtaacactctttttgtggaatttgcaagtggagatttcagccgctttgaagtcaaaggtagaaaaggaaatatcttcgtataaaaactagacagaatgattctcagaaacttccttgtgatgtgtgcgttcaactcacagagtttaacctttcttttcatagagcagttaggaaacactctgtttgtaaactctgcaagtggatattcagacctctttgaggccttcgttggaaacgggatttcttcatactatgctagacagaagaattctcagtaacttaccttgtgttgtgtgtattcaactgacagagttgaactttcatttacacagagcagatttgaaacactctttttgtggaatttgcaaatggagatttcaagcgctttgaggccaaaggcagaaaaggaaatatcttcgtataaaaactagacagaatcattctcagaaactgctctgcgatgtgtgcgttcaactctcagagtttaacttttcttttccttcagcagtttggaaacactctgtttgtaaagtctgcacgtggataatttgaccacttagaggccttcgttggaaacgggtttttttcatgtaaggtctagacagaagaattcccagtaacttccttgtgttgtgtgcattcaactcacagagttgaacgttcccttagacagagcagatttgaaacactctatttgtgcaattggcaagtgtagatttcaagcgctttaaggtcaatggcagaaaaggaaatatcttcgtttcaaaactagacagaatgattctaagaaaatcttttgtgatgtgtgcgttcaactcacagagtttaacttttcttctcatagagcagttaggaaacactctgtttgtaaagtctgcaagtggatattcagacctctttgaggccttcgttggaaacgggatttcttcatattatgctagacagaataattctcagtaacttccttgtgttgtgtgtattcaactcacagagttgaaggatcctttacagagagcaggcttgaaagactctttttgtcgaatttgcaagtggagatttcagccgctttgaggtcaatggtagaataggaaatatcttcttatacaaactagacagaatgattctgagaaactcctttgtgatgtgtgcgttcatctcacagagtttaacctttcttttcatagagcagttaggaaacactctgtttgtaaagtctgcaagtggatattcagacctccttgaggccttctttggaaacgggatttcttcatattatgctagacacaagtattcccagtaacttccttgtgttgtgtgtgttcaactcacacagttgaactttgatttacacagagcagatttgaaacactctttttgtggaatttgcaagtggagatttcaagcgctttgaggccaaaggcagaaaaggaaatatcttcgtataaaaactagacagaatcattctcagaaactgctctgcgatgtgtgcgttcaactcttagagtttaacttttcttttcattcagcagtttggaaacactctgtttgtaaagtctgcacgtggatattttgaccacttagaggccttcgttggaaacgggtttttttcctgtaaggctagacagaagatttcccagtaaattccttgtgttgtgtacattcaactcacagagttgaacgttcccttagacagagcagatttgaaacactctttttgtgcaattggcaagtggagatttcaagcgctttaaggtcaatggcagaaaaggaaatatcttcgtttcaaaactagacagaatcattcccacaaactgcgttgtgatgtattcgttcaactcacagagtttaacctttcttttcatagagcagttaggaaacagtctgtttgtaaattctgtaagtggatattctgacatcttgtggccttcgttggaaacgggatttcttcacattctgctagacagaagaattctcagtaacttccttgtgttgtgtgtattcaactcacagaattgaatgatcctttacacagaacagtcttgaaacactctttttgtggaatttgcaagtggagatttcagccgctttgaggtcaatggtagaataggaaatatcttcctatagaaactagacagaatgattctcagaaactcctttgtgatgtgtgcgttcaactcacagagttcaacctttcttttcatagagcagttaggaaacactctgtttgtaaagtctgcaagtggatattcagacatctttgaggctttcgttggaaacgggatttcttcatattctgctagacagaagaattcccagtaacttccttgtgttgtgtgtgtccaactcacagagttgaactttcatttacacagagcagatttgaaacactctttttgtggaacttgcaagtggagatttcaagcgctttgaggccaaaggcagaaaaggaaatatcttcatttcaaaactagacagaatcattctcagaaactgctctgcgatgtgtgcgttcaactctcagagtttaacttttcttttcattcagcagtttggaaacactctggttgtaaagtctgcacgtggatattttgaccacttagaggccttcgttggaaacgggtttttttcctgtaaggctagacagaagaattcccagtaacttccttgtgttgtgtgcattcaactcacagtgttgaacgttcccttagacagagcagatttgaaacactctatttgtgcaatttgcaagtgtagatttcaagcgctttaaggtcaatggcagaaaaggaaatatcttcgtttcaaaactagacagaatcattcccacaaactgcgttgtgatgtgttcgttcaactcacagagtttaacctttccgttcatagagcagttaggaaacacactgtttgtaaagtctgtaagtggatattctgacatcttgtggccttcgttggaaacgggatttcttcatattctgctagacagaagaattctcagtaacttccttgtgttgtgtgtattcaactcacagagttgaacgatcctttacacagagcagacttgtaacactctttttgtggaattcgcaagtggagatttcagccgctttgaagtcaaaggtagaaaaggaaatatcttcctataaaaactagacagaatgtttctcagaaacttctttgtgatgtgtgcgttcaactcacagagtttaacctttcttttcatagagcagttaggaaacactctgtttgtaaagtctgcaagtggatattcagacctctttgaggccttcgttggaaacgggatttcttcatactgtgctagacagaagaattctcagtaacttccttgtgttgtgtgtattcaactcacagagttgaacgatcctttacacagagcggactggaaacactctttttgtggaatttgcaagcggagatttcaggtgcgttgaggtcaatggtagaaaaggaaatatcttcgtataaaaactagacagaatcattctcagaaactgctctgcgatgtgtgcgttcaactctcagagtttaacttttcttttcattcagcagttcggaaacactctgtttgtaaagtctgcacgtggatattttgaccacttagatgccttctttggaaacgggtttttttcttgtaaggctagacagaagaattcccagtaacttccttgtgttgtgtgcattcaactcacagacttgaacgttcccttagacagagcagatttgaaacactctatttgtgcaatttgcaagtgtagatttcaagcgctttaaggtcaatggcagaaaaggaaatatcttcgtttcaaaactagacagaatcattcccacaaacagcgttgtgatgtgttcgctcaactcacagagtttaacctttcttttcatagagcagttaggaaacagtctgtttgtcaattctgtaagtggatattctgacatcttgtggcattcgttggaaacgggatttcttcatattctgctagacagaagaattctcagaatcttccttgtgttgtgtgtattcaactcacagagttgaacgatcctttacacagagcagacttgaaacactctttttgtggaatttgcaagtggagatttcagccgctttgaggaccatggtagaaaaggaaatatcttcgtataaaaactagacagaatgattctcagaaactcctttgtgatgtgtgctttcaacgcacagagtttaacctttcttttcatagagcagttaggaaacactctgttggtaaagtctgcaagtggatattcagacctccttgaggccttcgttggaaacgggatttcttcatattatgctagacagaagaattctcagtaactttccttgtgttgtgtgtattcaactgacagagttgaactatcatttagagagagcagatttgaaacactgtttttgtggaatttgcaagtggagatttcaagcgctttggggccaaaggcagaaaaggaaatatcttcgtataaaaactagacagaataattgtcagaaactgctgcgtgatgtgtgcgttcaactctcagagtttaacttttcttttcattcagcggtttggaaacactctgtttgtaaagtctgcacgtggaaattttgaccacttagaggccttcgttagaaacgggtttttttcatgtaaggctagacagaagaattcccagtaacttccttgtgttgtgtgcattcaactcacagagttgaacgttcccttagacagagcagatttgaaacactctatttgtgcaatttgcaagtgtagatttcaagcgctttaaggtcaatggcagaaaaggaaatatcttcgttttaaaactagacagaatgattctcagaaaatcctttgtgatgtgtgcgttcaactcacagagtttaacctttcttttcatagagcagttaggaaacactctgtttgtaaagtctgcaagtggatattcagacctctttgaggccttcgttggaaacgggatttcttcatattctgctagacagaagaattctcagtaacttccttgtgtagtgtatattcaactcacagagttgaacgatcctttacacagagcagacttgaaacactctttttgtggaatttgcaagtggagatttcagccgctttgaggtcaatagtagaaaaggaaatatcttcgtagaaaaactagacagaatgattctcagaaactgctttgtgatgtgtgcgttcaactcacaaagtttaacctttcttttcatagagcagttaggaaacactctgtttgtaaagtctgcaagtggatattcagacctctttgaggccttcgttggaaacgggtttttttcatataaggctagacagaagaattctcagtaacttccttgtgttgtgtgtattcaactgacagagttgaactttcatttagagagagcagatttgtaacactgtatttgtggaatttgcaagtgtagatttcaagcgatttgcggccaaaggcagaaaaggaaatatcttcgtataaaaactagacaggatcattctcagaaactgctctgcgatgtgtgcgttcaactctcagaatttaacttttcttttcattcagcagtttggaaacactctgtttgtaaagtctgcacgtggatattttgaccacttagaggccttcgttggaaacgggtttttttcctgtaaggctagacagaagaattcccagtaacttccttgtgttgtgtacattcaactcacagagttgaacgttcccttagacagagcagatttgaaacactctttttgtgcaattggcaagtggagatttcaagcgctttgaggtcaatggcagaaaaggaaatatcttcgtttcaaaactagacagaatcattcccacaaactgcgttgtgatgtgttcgttcatctcacagagtttaacctttcttttcgtagagcagttaggaaacagtctgtttgtaaattctgtaagtggatattctgacatgcttgtggccttcgttggaaacgggatttgcttcatattctgctagacagaagaattctcagtaacttcgttgtgttgtgtgttttcaactcacagagttaaaggatcatttacacagagtagacttgaaacactctttttgtggaattggcagggtggagatttcagccgctttgaggtcaatggtagaaaaggaaatatcttcgtataaaaactagacagagtgattctcagaaactcctttgtgatgtctgcgttcaactcacagagtttaacctttcttttcatagagcagttaggaaacactctgtttgtaaagtctgcaagtggatattccgacctccttgagggcttcgttggaaacgggatttcttcatattatgctagacagaagaattcccagtaacttccttgtgttgtgtgtgttcaacccacagagttgaactttcatttacacagagcagatttgaaacactctttttgtggaatttgcaagtggagatttcaagcgctttgaagccaaaggcagaaaaggaaatatcttcgtttcaaaactagacagaatcattctcagaaactgctctgcgatgtgtgcattcaactctcagagtttaacttttcttttcattcagcagtttggaaacactctgtttgtaaagtctgcacgtggataatttgaccacttagaggccttcgttggaaacgggtttttttcatgtaaggctagacagaagaattcccagtaacttccttgtgttttgtgcattcaactcacagagttgaacgttcccttagacagagcagatttgaaacactctatttgtgcaatttgcaagtgtagatttcaagcgctttaaggtcaatggcagaaaaggaaatatcttcgtttcaaaactagacagaatcactcccacaaactgcgttgtgatgtgtgcgttcaagtcaaagagtttaacctttcttttcatagagcagttaggaaacactctgtttgtaaagtctgcaagtggatattcagacctccttgaggccttcgttggaaacgggatttcttcatattctgctagacagaatgattctcagaaactcctttgtgatgtgtgcgttcaactcacagagtttaacctttcttttcatagagcagttaggaaacactctgtttgtaaagtctgcacgtggatattcagacctctttgaggccttcgttggaaacgggatttcttcatattctgctagacagaagaattcccagtaacttccttgtgttgtgtgtgttcaactcacagagttgaactttgatttacactgagcagatttgaaacactctttttgtggaatttgcaagtggagatttcaagcgctttgaggccaaaggcagaaaaggaaatatcttcgtataaaaactagacagaatcattctcagaaacagctctgcgatgtgtgcgttcaactctcagagtttaacttttcttttcattcagcagtttggaaacactctgtttgtaaagtctgcacgtggataatttcaccacttagaggtcttcgttggaaacgggattttttcatgtaaggctagacagaagaattcctagtaacttcccttgggttgtgtacattcaactcacagagttgaacgttcccttagacagagcagatttgaaacactctttttgtgcaattggcaagtggtgatttcagccgctttgcggtcaatggtataaaaggaaatatcttcgtattaaaactagacagaatcattcccacaaactgcgttgtgatgtgttcgttcaactcacagagtttaacctttcttttcatagagcagttacgaaacagtctgtttgtaaattctgtaagtggatattctgacatcttgtggccttcgttggaaacgggatttcttcatattctgctagacagaagaattctcagtaacttccttgtgttgtgtgtattcaactcacagagttgaactctggtttacacagagcagatttgaaacactctttttgtggaatttgcaagtggagatttcagccgctttgaggtcaatggtagaaaaggaaatatcttcgtataaaaactagacagaatgattctcagaaactcctttgtgatgtgtgcgttcaactcacagagtttaacctttcttttcgtagagcagttaggaaacactctgtttgtaaactctgcaagtggatatacagacctctttgaggccttcgttggaaacgggatttcttcatactatgctagacagaagaattcccagtaacttccttgtgttgtgtgtgttcaactcacagaattgaactttcatttacacagagcagatttgaaacactctttttgtggaatttgcaagtggagatttcaagcgctttgaggccaaaggcagaaaaggaaatatcttcgtttcaaaactagacagaatcattctcagaaactgctctgcgatgtgtgcgttcaactctcagagtttaacttttcttttctttcagcagtttggaaacactctgtttgtaaagtctgcacgtggataatttgaccacttagaggccttcgttggaaacgggtttttttcatgtaaggctagacagaggaattctcagtaacttccttgtgttgtgtgtattcaactcacagagttgaacgatcctttacacagagcagacttgtaacactctttttgtggaatttgcaagtggagatttcagccgctttgaagtcaaaggtagaaaaggaaatatcttcctataaaaactagacagaatcattcccagaaactgcgttgtgatgtgttcgttcaactcacagagtttaacctttctgttcatagagcagttaggaaacactctgtttgtaaagtctgtaagtggatattctgacatcttgtggccttcgttggaaacgggatttcttcatattctgctagacagaagaattctcagtaacttccttgtgttgtgtgtattcaactcacagagttgaacgatcctttacacagagcaaacttgaaacactctttttgtggaatttgcaagtggagatttcagccgctttgaggtcaatggtagaaaaggaaactatcttcatataaagactagacagaatgattctcagaaactcctttgtgatgtgtgtgttcacctcacagagtttaacctttcttttcatagagcagttagtaaacactctgtttataaagtctgcaagtggatattcagacccctttgaggccttcgttggaaacggtatttcttcatattatgctagacagaggaattcccagtaacttccttgtgttgtgtgtgttcaactcacagagttgaactttcatttacacagagcagatttgaaacactctttttgtggaatttgcaggtggagatttcaagcgctttgaggccaaaggcagaaaaggaaatatcttcgtataaaaactagacagaatcattctcagaaaatgctctgtgatgtgtgcgttgaactctcagagtttaacttttgttttcattcagcagtttggaaatactctgtttgtaaagtctgcacgtggatattttgaccacttagaggccttctttggaaacgggtttttttcatgtaagggtagacagaagaattcccagtaacttccttgtgttgtgtgcattcaactcacagagttgaacgttcccttagacagagcagatttgaaacactctatttgtgcaatttgcaagtgtagaattcaagcgctttaaggtcaatggcagaaaaggaaatatcttcgtttcaaaactagacagaatcattcccacaaactgcgttgtgatgtgttcgttcaactcacagagtttaacctttctgttcatagagcagttaggaaacactctgtttgtaaagtctgtaagtggatattgctgacatacttgtggccttcgttggaaacgggatttcttcatattctgctagacagagagattctcagtaacttccttgtgttgcgtgtattcaactcacagagttcaacgatcctttacacagagcagacttgaaacacactttttgtggaatttgcaagtggagatttcagccgctttgaggtcagtggtagaaaaggaaatatcttcgtataaaaactagacagaatgattctcagaaactcctttgtgatgtgtgcgttcaactcacagagtttaacctttcttttcatagagcagtgaggaaacactctgtttgtaaagtctgcaagtggatattcagacctctttgtggccttcgttggaaacgggatttcttcatattatgctagacagaagaattcccagtaacttccttgtgttgtgtgtgttcaactcacagagttgaactttcatttacacagagcagatttgaaacactctttttgtgcaatttgcaagtggcgatttcaagcgctttgaggccaaaggcagaaaaggaaatatcttcgtataaaaactagacagaatcattctcagaaactactctgtgatgtgtgcgttcaactctcagagtttaacttttcttttcattcagtagtttggaaacactctgtttgtaaatctgcacgtggatattttgacgacttagaggctttcgttggaaacgggtttttttcatgtaaggctagacagaagaattcccagtaacttccttgtgttgtgtgcattcaactcacagagttgaacgttcccttagacagagcagatttgaaacactctatttgtccaatttgcaagtgtagatttcaagcgctttaaggtcaacggcagaaaaggaaatatcttcgtttcaaaactagacagaatcattcccacaaactgcgttgtgatgtgttcgttcaactcacagagtttaacctttctgttcatagagaagttaggaaacactctgtttgtaaagtctgtaagtggatattctgacatcttgtggccttcgttggaaacgggatttcttcatattctgctagacagaagaattctcagtaacttccttgtgttgtgtgtattcaactcacagagttgaacgatcctttacacagagcagacttgtatcactctttttgtggaatttgcaagtggagatttcagccgctttgaagtcaaaggtagaaaaggaaatatcttcctataaaaactagacagaatgattctcagaaactcctttgtgatgtgtgtgttcaactcacagagtttaacctttcttttcatagagcagttagtaaacactctgtttataaagtctgcaagtggatattcagacccctttgaggccttcgttggaaacgggatttctccatattatgctagacagaaggattcccagtaacttccttgtgttgtgtgtgttcaactcacagagttgaactttcttttacaaatagcagatttgaaacactctttttgtggaatttgcaagtggagatttcaagcgctttgaggccaaaggcagaaaaggaaatatcttcgtataaaaactagacagaatgattctcagaaactcctttgtgatgtgtgcgttcaactcacctttcttttcatagagcagttaggaaacactctgtttgtaaagtctgcacgtggatatttggacttctttgaggccttcgttggaaacgggtttttttcatgtaaggctagacagaataattcccagtaacttccttgtgttgggtgcattaaactcacagagttgaacgttcccttagacagagcagatttgaaacactctatttgtgcaatttgcaagtgtagatttcaagcgctttaaggtcaatggcagaaaaggaaatatcttcgtttcaaaactagacagaatcattcccacaaactgcgttgttatgtgttcgttcaactcacagagtttaacctttcttttcatagagcagttaggaaacactctgtttgtaaattctgtaagtggatattctgacaacttgtggccttcgttggaaacgggatttcttcatactatgctagatagaaagaattctcagtaacttccttgtgttgtgtgtattcaactcacagcagttgaacgatcctttacacagagcagacttgaaacactctttttgtggaatttgcaagtggagatttcagccgctttgaggtcaatagtcgaaaaggaaatatcttcgtagaaaaactagacagaatgattctcagaaactcctttgtgatgtgtgcgtttaactcacagaatttaacctttcttttcatagagcagttaggaaacactctgtttgttaaagtctgcaagtggatattcagacctctttgaggccttcgttggaaacgggatttcttcatattctgctagacagaagaattctcagtaacttccttgtgttgtgtgtattcaactgacagagttgaactatcatttagagagagcagatttgaaacactgtttttgtggaatttgcaagtggagatttcaagcgctttggggccaaaggcagaaaaggaaatatcttcgtataaaaactagacataatcattctcagaaactgctctgcgatgtgtgccttcaactctcagagtttaacttttcttttcattcagcagtttggaaacactctgtttgtaaagtctgcacgtggatattttgaccacttagaggccttctttggaatcgggtttttttcctgtaaggctagacagaagaattcccagtaacttccttgtgttgtgtacattcaactcacagagttgaaggttcccttagacagagcagatttgaaacactctttttgtgcaattggcaagtggagatttcaagcgctttaaggtcaatggcagaaaaggaaatatcttcgtttcaaaactagacagaatcattcccacaaactgcgttgtgatgcgtttgttcaactcacagaatttaacctttcttttcatagagcagttaggaaacagtctgtttgtaaattctgtaagtggatattctgacatcttgtggcctcgctggaaacgggattacttcatattctgctagacagaagaattctcaataacttccttgtgttgtgtgtattcaactcacagagttgaacgatcctttacacagagcagatttgaaacactctttttgtggaatttgcaagtggagatttcagccgctttgaggtcaatggtagaaaaggaaatatcttcgtatgaaaactagacagaatgattctcataaactccctttgtgatgtgtgcgttcaactcacagagtttaacctttcttttcatagagcagttaggaaacactctgtttataaagtctgcaagtggatattcagacctccttgaggccttcgttggaaacgggatttcttcatattctgctagacagaagaattctcagtaacttccttgtgttgtgtgtattcaactgacagagttgaactttcatttagacagagcagatttgaaacactctttttgtggaatttgcaaatggagatttcaagcgctttgaggccaaaggcagaaaaggaaatatcttcgtataaaaactagacagaatgattctcagaaactgctctgcgatgtgtgcgttcaactctcagagtgtaacttttcttttcattcagcagtttggaaacactctgtttataaagtctgcacgtggatattttgaccacttagaggccttcgttggaaacgggattttttcatgtaaggctagaccgaagaattcccagtaacttccttgtgttgtgtacattcaactcacagagttgaacgttcccttagacagagcagatttgaaacactctttttgtgcaattggcaagtggagatttcaagcgctttaaggtcaatggcagaaaaggaaatatcttcgtttcaaaactagagagaatgattctcagaaacttcattgtgacgtgtgcgttcaactcacagagtttaacctttcttttcatagagcagttaggaaacagtctgtttgtcaattctgtaagtggatattctgacatcttgtggccttcgttggaaacgggatttcttcatattctgctagacagaagaattcccagtaacttccttgtgtggtgtgtattcaactcacagagttgaacgatgctttacacagagcagacttgaaacactctttttgtggaatttgcaagtggagatttcagccgctttgaggtcaatggtagaataggaaatatcttcctatagaaactagacagagtgattctcagaaactcctttgtgatgtctgcgttcaactcacagagtttaacctttcttttcatagagcagttaggaaacactctgtttgtaaagtctgcaagtggatattcagacctccttgaggccttcgttggaaatgggatttcttcatattatgctagacagaagaattctcagtaacttccttgtgttgtgtgtattcaactcacagagttgaactttcatttagagagagcagatttgaaacactgtttttgtggaatttgcaagtggagatttcaagcgctttgcggccaaaggcagaaaacgaaatatcttcgtataaaaactagacagaatcattctcagaaactgctgcgtgatgtgtgcgctcaactctcagaatttaacttttcttttcattcagcggtttggaaacactctgtttgtaaagtctgcacgtggatattttgaccacttagaggccttcgttggaaacgggtttttttcatgtaaggctagacggaagaatttcccagtaacttccttgtgttgtgtgcattcaactcacagagttgaacgttcccttagacagagcagatttgaaacactctatttgtgcaatttgcaagtgtagatttcaagcgctttaaggtcaatggcagaaaaggaaatatcttcgtttcaaaactagacagaatcattcccacaaactgcgttgtgatgtgttcgttcaactcacagagtttaacctttctgttcatagagcagttaggaaacactctgtttgtaaagtctgtaagtggatattctgacatcttgtggccttcgttggaaacgggatttctttatattctgctagacagaagaattctcagtaacttccttgtgttgtgtgtattcaactcacagagttgaacgatactttacagagagcagacttgacacactctttttgtggaatttgcaattggagatttcagccgctttgaggtcaatggtagaataggaaatatcttcctatagaaactagacagaatgattctcagaaactcctttgtgatgtgtgcgttcaactcacagagtttaacctttcttttcatagagcagttgggaaacactctgtttgtaaagtctgcaagtggatattcagacttctttgaggccttcgttggaagcgggatttcttcatgttctgctagacagaagaattcccagtaacttccttgtgttgtgtgtgttcaactcacagagttgaactttgatttacacagagcagatttgaaacactccttttgtggaatttgcaagtggagatttcaagcgctttgaggccaaaggcagaaaaggaaatatcttcgtataaaaactagacagaatcattctcagaacctgctgcgcgatatgtgcgttcaactctcagagtttaacttttcttttcattcagcggtttggaaacactctgtttgtaaagtctgcacgtggatattttgaccacttagagtccttcgttggaaacgggtttttttcatgtaaggctagacagaagaattcccagtaacttccttgtgttgtgtgcattcaactcacagagttgaacgttcccttagacagagcagatttgaaacagcctatttgtgcaatttgcaagtgtagatttcaagcgctttaaggtcaacggctgaaaaggaaatatcttcctttcaaaactagacagaatcattcccacaaactgcgttgtgatgtgttcgttcaactcacagagtttaacctttctgttcatagagcagttaggaaacactctgtttgtaaagtctgtaagtggatattttgacatcttgtggccttcgttggaaacgggatttcttcatattctgctagacagaagaattctcagaaacttccttgtgttgtgtgtattcaagtcacagagttgaacgatcctttacacagagcagacttgaaacactctttttgtggaatttgcaagtggagatttcagccgctttgaggtcaatgttagaaaaggaaatatcttcgtataaagactagacagaatgattctcagaaaatcttttgtgatgtgtgcgttcaactcacagagtttaacatttcttctcatagagcagttaggaaacactctgtttgtaaagtctgcaagtggatattcagacttctttgaggccttcgttggaaacgggatttcttcatattatgctagacagaagaattctcagtaacttccttgtgttgtgtgtattcaactgacagagttgaactttcatttagagagagcagatttgaaacactgtttttgtggaatttgcaagtggagatttcaagcgctttggggccaaaggcagaaaacgaaatatcttcgtataaaaagtagacagaatcattctcagaaactgctctgcgatgtgtgcgttcaactctccagagtttaacttttcttttcattcagcagtttggaaacactctgtttgtaaagtctgcacgtggatattttgaccatttagaggctttcgttggaaacgggtttttttcttgtaaggctagacagaagaattcccagtaacttccttgtgttgtgtgcattaaactcacatagttgaacgtttccttagacagagctgaattgaaacacgctatttgtgcaatttgcaagtgtagatttcaagcgctttaaggtcaatggcagaaaaggaaatatcttcgtttcaaaactagacagaatcattcccacaaactgcgttgtgatgtgttcgttcaactcacagagtttaaactttcttttcatagagcagttaggaaacagtctgtttgtcaattctgtaagtggatattctgacatcttgtggccttcgttggaaacgggatttcttcatattctgctagacagaagaattctcagtaacttccttgtgttgtgtgtattcaactcacagagttgtacgatcctttacacagagcagacttgaaacactctttttgtggaatttgcaagtggagatttcagccgctttgaggtcaatggtagaaaaggaaatatcttcgtataaagactagacagagtgattctcagaaactcctttgtgatgtctgcgttcaactcacagagtttaacctttcttttcatagagcagttaggaaacactctgtttgtaaagtctgcaggtgcatattcagacctccttgaggccttagttggaaacgggatttcttcatattctgctatacagaagaattctcagtaacttccttgtgttgtgtgtattcaactcacagagttgaactttcatttacacagagcagatttgaaacactctttttgtggaatttgcaaatggagatttcaagcgctttgaggccaaaggcagaaaaggaaatatcttcgtttcaaaagtagacagaatcattctcagaaactgctgcgttatgtgtgcgttcaactctcagagtttaacttttcttttcattcagcggtttggaaacactctgtttgtaaagtctgtaagtggatattttgaccacttagaggccttcgttggaaatggttttttgcatgtaaggctagacagaagtattcccagtaacttccttgtgttgtgtgcattcaactcacagagttgaacgttccctaggacagagcaggtttgaaacactctatttgtgcaatttgcaagtgtagatttcaagcgcattaaggtcaatggcagaaaaggaaatatcttcgtttcaaaactagacagaatcattcccacaaactgcgttgtgatgtgttcggtcaactcacagagtttaacctttcttttcatagagcagttaggaaacagtctgtttgtcaattctgtaagtggatattctgacatcttgtggccttcgttggaaacgggatttcttcatattctgctagacagaagaattctcagtaacttccttgtgttgtgtgtattcaactcacagagttgaacgatcctttacacagagcagacttgtaaaactctttttgtggaatttgcaagtggagatttcagccgctttgaagtcaaaggtagaaaaggaaatatcttcctataaaaactagacagaatgattctcagaaactcctttgtgatgtgtgcgttcaactcacagagtttaacctttcttttcatagagcagataggaaacactctgtttgtaaagtctgcaagtggatattcagacctccttgaggccttcgttggaaacgggatttcttcatattatgctagacagaagaattctcagtaacttccttgtgttgtgtgtattcaactgacagagttgaactttcatttagagagagaagatttgaaacactgtttttgtggaatttgcaagtggagatttcaagcgctttggggccaaaggcagaaaaggaaatatcttcgtataaaaactagacagaatcattctcagaaactgctgcgtgatgtgtgcgttcaactctcagagtttagcttttcttttcattcagcggtttggaaacactctgtttgtaacgtctgcacgtggatattttgaccacttagaggccttcgttggaaacgggttttttgcatgtaaggctagacagaagaattcccagtaacttccttgtgttgtgtgcattcaactcacagagttgaacgttcccttagacagagcagatttgaaacactctatttgtgcaatttgcaagtgtagatttcaagcgcattaaggtcaatggcagaaaaggaaatatcttcgtttcaaaattagacagaatcattcccacaaactgcgttgtgatgtattcgttcaactcacagagtttaacctttctgttcatagagcagttaggaaacactctgtttgtaaagtctgtaagtggatattctgacatcttgtggcccttcgttggaaacgggatttcttcatattctgctagacagaagaattctcagtaacttccttgtgttgtgtgtattcaactcacagagttgaaggatcctttacagagagcaggctagaaaaactctttttgtcgaatttgcaagtggagatttcagccgctttgaggtcaatggtagaataggaaatatcttcttatagaaactagacagaatgattctcagaaactcctttgtgatgtgtgtgttcaactcacagagtttaatctttcttttcatagagcagttagtaaacactctgtttataaagtctgcaagtggatattcagacccctttgaggccttcgttggaaacgggatttcttcatattatgctagacagaagaaatctcagtaacttccttgtgttgtgtgtattcaactgacagagttgaagtttcatttagacagagcagatttgaaacactatttttgtgcaatttgcaagtggagatttcaagcgctttggggccaaaggcagaaaaggaaatatcttcgtataaaaactagacagaatcattatcagaaactgctgcgtgatgtgtgcgttcaactctcagaatttaacttttcttttcattcagcggtttggaaacactctgtttgtaaagtctgcacgtggatattttgaccacttagaggccttcgttggaaacgggtttttttcatgtaaggctagacagaagatttcccagtaacttccttgtgttgtgtacattaaactcacagagttgaacgttcccttagacagagcagatttgaaacactctttttgtgcaattggcaaatggagatttcaagcgctttaaggtcaatggcagaaaaggaaatatcttcgtttcaaaactagacagaatcattcccacaaactgcgttgtgatgtgctcgttcaactcacagagtttaacctttctgttcacagagcagttaggaaacactctgtttgtaaagtctgtaagtggatattctgacatcttgtggccttcgttggaaacgggatttcttcatattctgctagacagaagaattctcagtaacttccttgtgttctgtgtattcaactcacagagttgaacgatcctttacacagagcagacttgaaacactctttttgtggaatttgcaagtggagatttcagccgctttggggtcaatagtagaaaaggaaatatcttcgtagaaaaactagacagaatgattctcagaaactcctttgtgatgtgtgtgttcaactcacagagtttaacctttcttttcatagagcagttagtaaacactctgtttataaagtctgcaagtggatattcagacccctttgaggccttcgttggaaacgggatttattcatattatgctagacagaagaattctcagtaacttccttgtgttgtgtgtattcaactgacagagttgaactttcatttagagagagcagttttgaaacactgtttttgtggaatttgcaagtggagatttcaagcgctttggggccaaaggcagaaaaggaaacatcttcgtatgaaaactagacagaatcattctcagaaagtgctctgcgatgtgtgcgttcaactctcagagtttaactttgcttttcattcagcagtttggaaacactctgtttgtaaagtctgcacgtggataatttgaccacttagaggccttcgttggaaacgggtttttttcatgtaaggctagacagaagaattcccagtaacttccttgtgttgtgtacattcaactcacagagttgaacgttcccttagacagagcagatttgaaacactctttttgtgcaattggcaagtggtgatttcagccgctttgaggtcaatggtagaaaaggaaatatcttcgtataaaaactagacagaatgattctcagaaactcctttgtgatgtgtgcgttcaactcacacagtttaacctttcttttcagagagcagttaggaaacactctgtttgtaaagtctgcaagtggatattcagacctccttgaggccttcgttggaaacgggatttcttcatattatgctagacagaagaattctcattaacttccttgtgttgtgtgtattcaactcacagagttgaacgatcctttacacagagcagacttgtaacactctttttgtggaatttgcaagtggagatttcagccgctttgaagtcaaaggtagaaaaggaaatatcttcctataaaaattagacagaatgattctcagaaactcctttgtgatgtgtgtgttcaactcacagagtttaacctttcttttcatagagcagttaggaaacactctgtttgtaaagtctgcaagtggatattcagacctctttgaggccttcattggaaacgggctttttttcctataaggctagacagaagaattccgagtaacttccttgtgttgtgtgtgttcaactcacagagttgaactttcatttacacagagcagatttgaaacactctttttgtggaatttgcaagtggagatttcaagcgctttgaggccaaaggcagaaaaggaaatatctccgtttcaaaactagacagagaatcattctcagtaaactgctctgcgatgtgtgcgttcaactctcagagtttaacttttcttttcattcagcagtttggaaacactctgtttgtaaagtctgcacgtggatattttgaccacttagaggccttcgttggaaacgggtttttttcctgtaaggctagacagtagaattcccagtaacttccttgtgttgtgtacattcaactcacagagttgaacgttcccttagacagagcagatttgaaacactctttttgtgcaattggcaaatggagatttcaagcgctttaaggtcaatggcagaaaaggaaatgtcttcgtttcaaaactagacagaatcattcccacaaactgcgttgtgatgtgttcgttcaactcacagagtttaacgtttcttttcatagagcagttaggaaacagtctgtttgtcaattctgtaagtggatattctgacatcttgtggccttcgttggaaacgggatttcttcatattctgctagacagaagaattctcagaatcttccttgtgttgtgtgtattcaactcacagagttgaacgatcctttacacagagcagacttgaaacactatttttgtggaatttgcaagtggagatttcagccgctttgaggtccatggtagaaaaggaaatatcttcgtataaaaactagacagaatgattctcagaaactcctttgtgatgtgtgcattcaacttacagagtttaacctttcttttcatagagcagttaggaaacactctgtttgtaaagtctgcaagtggatactcagacctctttgaggccttcgttggaaacgggatttcttaatattatgctagacagaagaattcccagtaacttccttgtgttgtgtgtgttcaactcacagagttgaactttcatttacacaaagcagatttgaaacactctttttgtggaatttgcaagtggagatttcaagcgctttgaggccaaaggcagaaaaggaaatatcttcgtttcaaaactagacagaatgattctcagaaactgctctgcgatgtgtgcgttcaactctcagagtttaacttttcttttcattcagcagtttggaaacactctgtttgtaaagtctgcacgtggatattttgaccatttagaggccttcgttggaaacgggtttttttcttgtaaggctagacagaagaattcccagtaacttccttgtgttgtgtacattcaactcacagagttgaacgttcccttagacagagcagatttgaaacactctttttgtgcaattggcaagtggtgatttcagctgctttgaggtcaatggcagaaaagggaatatcttcgtataaaaactagacagaacgattctcagaatcttccttgtgatgtgtgcgttcaactcacagagtttaacctttcttttcatagagcagttaggaaacactctgtttgtaaactctgcaagtggatattcagacctcattgaggccttctttggaaacgggatttcttcatactatgctagacagaagaattctcagtaacttccttgtgttgtgtgtattcaactcacagagttgaacgatcctttacacagagcagacttgaaacactctttttgtggaatttgcaagtcgagatttcagccgctttgaggtcaatggtagaaaaggaaatatcttcgtataaaaactagacagaatgattctcagaaactgctttgtgatgtgtgcgtttaactcacagagtttaacctttcttttcatagagcagttaggaaacactctgtttgtaaagtctacaagtgtatattcagacctctttgaggccttcgttggaaacgggtttttttcatataaggctagacagaagaattctcagtaacttccttgtgttgagtgtattaaactcacagagttcaatgatcctttacacagagcggacttgaaacactctttttctggaatttgcaagtggagatttcagccgcgttgaggtcaatggtagaaaagggaaatatcttcgtataaaaactagacagaatgattctcagaaactcctttatgatgtgtgcgttcaactcacagagtttaacctttcttttcatagagcagttaggaaacactctgtttgtaaagtctgcaagtggatattttcacctctttgaggccttcgttggaaacgggttttttttcatgtaaggctagacagaagaattctcagtaacttccctgtgttgtgtgttttcaactgacagagttgaactttcatttagagagagcagatttgaaacactgtttttgtggaatttgcaagtggagatttcaagcgttttggagccaaaggcagaaaaggaaatatcttcgtataaaaactagacagaatcattctcagaaactgctgcgtgatgtgtgcgttcaactctcagagtttaacttttcctttcattcagcggtttggaaacactctgtttgtaaagtctgcacgtggatattttgaacacttagaggccttcgttggaaacgggtttttttcatgtaaggctagacagaagaatttccagtaacttccttgtgttgtgtgcattcaactcacagagttgaacgttcccttagacagagcagatttgaaacactctagttgtgcaatttgcaagtgtagatttcaagcgctttaaggtcaatggcagaaaaggaaatatcttcgtttcaaaactagacagaatgattctcagaaaatcttttgtgatgtgtgcgttcaactcacagagtttaacttttcttctcatagagcagttaggaaagactctgtttgtaaagtctgcaagtggatattcagacctctttgaggccttcgttagaaacgggatttcttcatattatgctagacagaataattctcagtaacttccttgtgttgtgtgtattcaactcacagagttgaacgatcctttacagagagcaggcttgaaacactctatttgtcgaatttgcaagtggagatttcagccgctttgaggtcaatggtagaataggaaatatcttcttatagaaactagacagagtgattctcagaaactcctttgtgatgtctgcgttcaactcacagagtttaacctttcttttcatagagcatttaggaaacactctgtttgtaaagtctgcaagaggatattcagacctccttgaggccttcgttggaaacgggatttcttcatattctgctatacagaagaattcccagtaacttccttgtgttgtgtgtgttcaactcacagagtttgaactttcatttacacagagcagatttgaaacactctttttgtggaatttgcaaatggagatttcaagcgctttgaggccaaaggcagaaaaggaaatatcttcgtataaaaactagacagaatcattctcagaaactgctctgcgatgtgtgcgttcaactctcagagtttaacttttcttttcattcagcagtttggaaaccctctgtttgtaaagtctgcacgtggataatttgaccacttagaggccttcgttggaaacgggtttttttcatgtaaggctagacagaagaattcccagtaacttccttgtgttgtgtacattcaactcacagagttgaacgttcccttagacagagcagatttgaaacactctttttgtgcaattggcaagtggagatttcaagcgctttgaggtcaatggcagaaaaggaaatatcttcgtttcaaaactagacagaatcattcccacaaactgcgttgtaatgtgtgcgttcaactcacagagtttaacctttcttttcatagagcagttaggaaacactctgtttgtaaagtctgcaagtggatattcagacctctttgaggccttcgttggaaacgggatttcttcatattctgctagacagaagaattctcagtaacttccttgtgttgtgtgtattcaactcacagagttgaacgatcctttacacagaacagacttgaaacactctttttgtggaatttgcaagtgcagatttcagccgctttgaggtcaatggtagaataggaaatatcttcctatagaaactagacagaatgattctcagaaactcctttgtgatgtgtgcgttcaagtcgcagagtttaacctttcttttcttggagcagttaggaaacactctgtttgtaaagtctgcacgtggatattcagacctctttgaggccttcgttggaaacgggatttcttcatattctgctagacagaagaattcccagtaacttccttgtgttgtgtgtgttcaactcacagagttgaactttcattttcacagagcagatttgaaacactctttttgtggaatttgcaagtggagatttcaagcgctttgaggccaaaggcagaaaaggaaatatcttcgtttcaaaactagacagaatcattctcagaaactgctctgcgatgtgtgcgttcaactctcagagtttaacttttcttttcattcagaagtttggaaacactctgtttgtaaagtctgcacgtggatattttgaccacttagaggccttcgttggaaacgggtttttttcctgtaaggctagacagaagaattcccagtaacttccttgtgttgtgtacattcaaatcacagagttgaacgttcccttagacagagcagacttgtaacactctttttgtggaattttcaagtggagatttcagccactttgaagtcaaaggtagaaaaggaaataacttcctataaaaactagacagaatcattcccacaaactgcgctgtgatgtgttcgttcaactcacagagtttaacctttctgttcatagagcagttaggaaacactctgtttgtaaagtctgtaagtggatattctgacatcttgtggccttcgttggaaacgggatttcttcatattatgctagacagaagaattctcagtaacttccttgtgttgtgtgtattcaactcacagagttgaccgatcctttacacagagcagacttgtaacactctttttgtggaatttgcaagtggagatttcagccgctttgaagtcaaaggtagaaaagggaatatcttcatataaaaactagacagaatgattctcagaaactcctttgtgatgtgtgcgttcaagtcacagagtttaacctttcttttcatagagcagttaggaaacactctgtttgtaaagtctgcaactggagattcagccctctttgaggccttcgttggaaacgggatttcttcatattctgctagacagaagaattcccagtaacttccttgtgttgtgtgtgttcaactcacagagttaaactttcatttacacagagcagatttgaaacactctttttgtggaatttgcaagtggagatgtcaagcgctttgaggccaaaggcagaaaaggaaatatcttcgtttcaaaactagacagaatcattctcagaaactgctctgcgatgtgtgcgttcaactctcagagtttaacttttcttttcattcagcagtttggaaacactctgtttgtaaagtctgcacgtggatattttgaccacttagaggccttcgttggaaacgtgtttttttcctgtaagcctagacagaagaattcccagtaaattcctagtgttgtgtgcattcaactcacagagatgaacgttcccttagacagagcagatttgaaacactctgtgcaatttgcaagtgtagatttcaagcgctttaatgtcaatggcagaaaaggaaatatcttcgcttcaaaactagacagaatcattccaacaaactgcgttgtgatgtgctctttcaactcatagagtttaacctttctgttcatagagcagttaggaaacactctgtttctaaagtctgtaagtggatattctgacatcttgtggccttcgttggaaacgggatttcttcatattctgctacacagaagaattctcagtaacttccttgtgttgtgtgtattcaactcacagagttgaacgatcctttacagagagcatacttgaaacactctttttgtggaatttgcaagtggagatttcagccgctttgaggtcaatggtagaataggaaatatcttcctatagaaacaagacagaatgattctctgaaactcctttgtgatgtgtgcgttcaactcacagagtttaacctttcttttcatagagcagttaggaaacactctgtttgtaaagtctgcaagtggatattcagacctccttgaggccttcgttggaaacgggatttcttcatattatgctagacagaagaattctcagtaacttcccttgtgttgtgtgtattcaactgacagagttgaactttcatttagagagagcagatttgaaacactgtttttgtggaatttgcaagtggagatttcaagcgctttggggccaaaggcagaaaaggaaatatcttcgtataaaaactagacagaatcattctcagaaactgctgcgtgatgtgtgcgttcaactctcagagtttaacttttcttttcattcagcggtttggaaacactctgtttgtaaagtctgcacgtggaaattttgaccacttagaggccttcatggaaacgggtttttttcatgtaaggctagacagaagaattcccagtaacttccttgtgttgtgtgcattcaactcacagagttgaacgttcctttagacagagcagatttgaaacactctatttgtgcaatttgcaagtgtagttttcaagctctttaaggtcaacggcagaaaaggaaatatcttggtttcaaaactagacagaatcattcccacaaactgcgttgtcatgtgttcgttcaactcacagagtttaacctttcttttcatagagcagttaggaaacagtctgtttgcaaattctgtaagtggatattctgacatcttgtggccttcgttggaaacggcatttcttcatattctgctagacagaagaattctcagaatcttgcttgtgttgtgtgtattcaactcacagagttgaacgatcctttacacagagcagacttgaaacactctttttgtggaatttgcaagtggagatttcagccgctttgaggtccatggtagaaaaggaaatatcttcgtcataaaaactagacagaatgattctcagaaacttctttctgatgtgtgcgttcaactcacagagtttaacctttcttttcatagagcagttaggaaacactctgtttgtaaagtctgcaagtggatattcagacctctttgaggccttcgttggaaacgggatttcttcatactgtgctagacagaagaattcccagtaacttgccttgtgttgtgtgtgttcaactcacagagttgaactttcatttacacagagcagatttgaaacactctttttgtggaatttgcaaatggagatttcaagcgctttgaggccaaagacagaaaaggaaatatcttcgtataaaaactagacagaatcattctcagaaactgctctgtgatgtgtgcgttcaactctcagagtttaacttttcttttcattcagcagtttggaaacactctgtttgtaaagtctgcacgtgcataatttgaccacttagaggtcttcgatggaaacgggtttttttcatgtaaggctagacagaagaattcccagtaacttccttgtgttgtgtgcattcaactcacagagttgaacgttcccttagacagagcagatttgaaacactctatttgtgcaatttgcaagtgtagatttcaagcgctttaaggtcaatggcagaaaaggagatatcttcgtttcaaaactagacagaatcattcccacaaactgcgttgtgatgtgttcgttcaactcacagagtttaacctttctcttcatagagcagttaggaaacactctgtttgtgaagtctgtaagtggatattctgacatcttgtggccttcgttggaaacgggatttcttcatattctgctagactgaagaattctcagtaacttccttgtgttgtgtgtattgaactcacagtgttgaacgatcctttacacagagcagacttgaaacactctttttgtggaatttgcaagtggagatttcagccgctttgaggtcaacagtagaaaaggaaatatcttcgtagaaaaactagacagaatgattctcagaaactcctttgtgatgtgtgcgttcaactcacagagtttaacctttctgttcatagagcagttaggaaacactctgtttgtaaagtctgcaagaggatattcagacctccttgaggccttcgttggaaacgggatttcttcatattctgctagacagaagaattctcagtaacttccttgtgttgtgtgtattcaactgacagagttgaactttcatttagagagagcagatttataacactgtttttgtggaatttgcaagtggagatttcaagcgctttggggccaaaggcagaaaaggaaatatcttcgtataaaaactagacagaatcattctcagaaactgatgcgtgatgtgtgcgttcaactctcagagtttaacttttcttttcattcagcggtttggaaacactctgtttgtaaagtctgcacgtggatattttgaccacttagaggccttcgttggaaacgggtttttttcatgtaaggctagacagaagaattcccagtaacttccttgtgttgtgtgcattccactcacagagttgaacgttcccttagacagagcagatttgaaacactctatttgtgcaatttgcaagtgtagatttcaagcgctttaaggtcaatggcagaaaaggaaatatcttcgtttcaaaactagacagaaacattcccacaaactgcgttgtgatgtgttcgttcaactcacagagtttaacttttctgttcatagagcagttaggaaacactctgtttgtaaagtctgcaattggatattcagacctccttgaggcattcgttggaaacgggatttcttcatattctgctagacagaataattctcagtaacttccttgtgttctgtgtattcaactcacagagttgaacgatcctttacagagagcagactttaaacactctttttgtggaatttgcaagtggagatttcagccgctttgaggtcaatggtagaaaaggaaatatcttcgtataaagactagacagaatgattctcagaaactcctttgagatgtgtgcgttcaactcacagagtttaacctttcttttcatagagcagttaggaaacactctgtttgtaaagtctgcaagtggatattcagacctctttgaggccttcgttggaaacgggtttttttcatataaggctagacagaagaattctcagtaacttccttgtgttgtgtgtattcaactcacagagttgaatgatcctttacacagagcagacttgaaacactctttttgtggaatttgcaagtggagatttcagccgctttgaggtcaatggtagaaaagtaaatatcttcctataaagactagacagaatcattctcagaaactgctctgcgatgtgtgcgttcaactctcagagtttaacttttcttttcattcagcagtttggaaacactctgtttgtaaagtctgcacgtggataacttgaccacttagaggccttcgttggaaacgggtttttttcctgtaaggctagacagaagaattcccagtaacttacttgtgttgtgtacattcaactcacagagttgaacgttcccttagacagagcagatttgaaacactctttttgtgcaattggcaagtggtgatttcagctgctttgaggtcaatggtagaaaagggaatatcttcgtataaaaactagacagaatcattcccacaaactgcgttgtgatgtgttcgttcaactcacagagtttaacctttcttttcatagagcagttaggaaacagtctgtttgtaaattctgtaaatggatattctgacatcttgtggccttcgttggaaactggatttcttcatactatgctagacagaagaattctcagtaacttccttgttttgtgtgtattcaactcacagagttgaacgatcctttacacagagcagacttgaatcactctttttgtggaatttgcaagtggagatttcagccgcgttgaggtcaatggtagaaaaggaaatatcttcgtataaaaactagacagaatgattctcagaaactcctttgtgatgtgtgcgttcaactcacagagtttaacctttcttttcatagagcagttaggaaacactctgtttgtaaagtctgcaagtggatattcagacctactttgaggccttcgttggaaacgggtttttttcatataaggctagacagaagaattctcagtaacttccttgtgttgtgtgtattcaactgacagagttgaactttcatttagagagagcagatttgaaacactgtttttgtggaatttgcatgtggagatttcaagcgctttggggccaaaggcagaaaaggaaatatcttcgtataaaaactagacagaatcattctcagaaactgctctgcgatgtgtgcgttcaactctcagagtttaacttttcttttcattcagcagtttggaaacactctgtttgtaaagtctgcacgtggataacttgaccacttagaggccttcgttggaaaagggtttttatcctgtaagggtagacagaagaattcccagtaacttccttgtgttgtgtgcattcaactcacagatttgaacgttcccttagacagagcagatttgaaacactctatttgtgcaattggcaagtgtagatttcaagcgctttaaggtcaatggcagaaaaggaaatatcttcgtttcaaaactagacagaatcattcccacaaaatgcgttgtgatgtgttcgttcaactcacagagtttaagctttctgttcatagagcagttaggaaacactctgtttgtaaagtctgtaagtggatattctgatatcttgtggccttcgttggaaacgggatttcttcatattatgctagacagaagaattcccagtaacttccttgtgttgtgtgcattcaactcacagagttgaacgttcccttagacagagcagatttgaaacactctatttgtgcaatttgcaagtgtagatttcaagcgctttatggtcaacggcagaaaagtaaatatcttcgtataaagactagacagaatgattctcagaaactcctttgtgatgtgtgcgttcaactcacagagtttaacctttcttttcatagagcagttaggaaacactctgtttgtaaagtctgcaagtggatattcagacctccttgaggccttcgttggaagcgggatttcttcatattctgctagacagaagaattctcagtaacttccttgtgttgtgtgtattcaactgacagagttgaactttcatttcgagagagcagatttgaaacactgtttttgtggaatttgcaagtggagatttcaagcgctttggggctaaaggcagaaaaggaaatatcttcgtataaaaactagacagaataattctcagaaactgctgcgtgatgtgtgcgttcaactctcagagtttaacttttcttttcattcagcggtttggaaacactctgtttgtaaagtctgcacgtggatatattgaccacttagaggccttcgttggaaacgggtttttgcatgtaaggctagacagaagaattcccagtaacttccttgtgttgtgtgcattcaactcacagagttgaacgttcccttagacagagcagatttcaaacactctatttgttcaatttgcaagtgtagatttcaagcgctttaaggtcaatggcagaaaaggaaatatcttcgtttcaaaactagacagaatcattcccacaaactgggttgtgatgtgttcgttcaactcacagagtttaacctttcttttcatagagcagttaggaaacagtctgtttgtcaattctgtaagtggatattctgacatcttgtggccttcgttggaaacgggatttcttcatattctcctagacagaagaattctcagtaacttccttgtgttgtgtgtattcaactcacagagttgaacgatcctttacacagagcagacttgaaacactctttttgtggaatttgcaagtggagatttcagccgctttgagttcaatggtagaataggaaatatcttcctatggaaactagacagaatgattctcagaaactcctttgtgatgtgtgcgttcaactcacaagagtttaacctttctgttaatagagcagttaggaaacactctgtttgtaaagtctgcaagtggatattcagacctccttgaggccttctttggaaacgggatttcttcatattctgctagacagaagaattctcagaaacttccttgtgttgtgtgtattcaactcacagagttgaacgatcctttacacagagcagacttgaaacactctttttgtggaatttgcaagtggagatttcagccgctttgaggtccatggtagaataggaaatatcttcctatagaaactagacagaatcattctcagaaactgctctgcgatgtgtgcgttcaactctcagactttaacttttcttttcattcagcagtttggaaacactctgtttgtaaagtctgcacgtgcataatttgaccacttagaggccttcgttggaaacgggtttttttcatgtaaggctagacagaagaattcccagtaacttccttgtgttgtgtgcattcaactcacagagttgaacgttcccttagacagagcagatttgaaatactctatttgtgcaatttgcaagtgtagttttcaagctctttaaggtcaacggcagaaaaggaaatatcttggtttcaaaactagacagaatcattcccagaaactgcgttgtgatgtgttcgttcaactcacagagtttaacctttctgttcatagagcagttaggaaacactctgtttgtaaagtctgtaagtggatattctgacgtacttgtggccttcgttggaaacgggatttcttcatattctgctagacagaagaattctcagtaacttccttgtgttgtgtgtattcaactcacagagttgaacgatcctttacacagagcagtcttgaaacactctttttgtggaatttgcaagtggagatttctgccgctttggggccaaaggcagaaaaggaaatatcttcgtataaaaactagacagaatgattctcagaaactcctttgtgatgtgtgtgttcaactcacagagtttaacctttcttttcatagagcagttaggaaacactctgtttgtaaagtctgcaagtggatattcagacctccttgaggccttcgttggaaacgggatttcttcatattatgccagacagaagaattctcagtaacttccttgtgttgtgtttattcaactgacagagttgaactttcatttagagacagcagatttgaaacactgtttttgtggaatttgcaagtggagatttcaagcgctttggggccaaaggcagaaaacgaaatatcttcgtataaaaactagacagaatcattctcagaaactgctgcgtgatgtgtgcgttcaactctaagagtttaacttttcttttcattcagcggtttggaaacactctgtttgtaaagtctgcacgtggatattttgaccactaagaggccttcgttggaaacgggtttttttcatgtaaggctagacagaagaattcccagtaacttccttgtgttgtgtacattcaactcacagagttgaaagttcccttagacagagcagatttgaaacactctttttgtgccattggcaagtggagatttcaagcgctttaaggtcaatggcagaaaaggaaatatcttcgtttcaaaactagacagaatcattcccacaaactgcgttgtgatgtgttcgttcatctcacagagtttaacctttcttttcatagagcagttaggaaacactctgtttgtaaattctgtaagtggatattctgacatcttgtggccttcgttggaaaagggatttcttcatcttctgctagacagaagaattctcagaatcttccttgtgttgtgtgtattcaactcacacagttgaacgatggtttacacagagcagatttgaaacactctttttgtggaatttggaagtggagatttcagccgctttgaggtcaatggtagaaaaggaaatatcttcgtataaaaactagacagaatgattttcatgaactcctttgtgatgtgtgcgttcaactaacagagtttaacctttcttttcatagagcagttaggaaacactctgtttgtaaagtctgcaagtggatattcagacctccttgaggccttcgttggaaacgggatttcttcatattctgctagacagaagaattcccagtaacttccttgtgttgtgtgtgttcaactcacagagttgaactttcatttacacagagcagatttgaaacactctttttgtggaatttgcaagtggagatttcaagcgctttgaggccaaaggcagaaaagtaaatatcttcgtataaaaactagacagaaatcattctcagaaactgctctgcgatgtgtgcgttcaactctcaggagtttaacttttcttttcattcagcagtttggaaacactctgtttgtaaagtctgcacgtggatattttgaccacttagaggccttcgttggaaacgggtttttttcctgtaaggctagacagaagaattcccagtaacttccttgtgttgtgtgcattcaactcacagagttgaactttcccttagacagagcagatttgaaacactctatttgtgcaatttgcaagtgtagatttcaagcgctttaaggtcaatggcagaaaaggaaatatcttcgtttcaaaactagacagaatcattcccacaaactgcgttgtgatgtgttcgttcaactcacagagtttaacctttctgttcatagagcagttaggaaacactctgtttgtaaagtctgtaagtggattttctgacatcttgtggccttcgttggaaacgggatttcttcatattctgctacacagaataattctcagtaacttccttgtgttgtgtgtattcaactcacagagttcaacgatcctttacacagagcagacttgaaacactctttttgtggaatttgcaagtggagatttcagccgctttgaggtcaatggtagaaaaggaaactatcttcgtataaagactagaaagaatgattctcagaaactcctttgtgatgtgtgcgttcaactcacagagtttaacctttcttttcatagagcagttaggaaacactctgtttgtaaactctgcaagtggatattcacacctctttgaggccttcgttggaaacgggatttcttcatactgtgctagacagaagaattctcagtaacttccttgtgttgtgtgtattcaactcacagagttgaacgatcctttacacagagcggagttgaaacactctttttgtggaatttgcaagtggagatttcagccgcattgaggtcaatggtagaaaaggaaatatcttcgtataaaaactagacagaatcattctcagaaactgctctgcgatgtgtgcgttcaactctcagagttcaacttttcttttcattcagcagtttggaaacactctgtttgtaaagtctgcacgtggataatttgaccacttagaggccttcgttggaaacgggtttttttcatgtaaggctagacagaagaattcccagtaacttccttgtgttgtgtacattcaactcacagagttgaacgttcccttagatagagcagatttgaaacactctttttgtgcaattggcaagtggagatttcaagcgctttaaggtcaatggcagaaaaggaaatatcttcgtttcaaaactagacagaatcattcccacaaactgcgttgtgaggtgttcgttcaactcacagagtttaacctttcttttcatagagcagttaagaaacagtctgtttgtaaattctgtaagtggatattctgacatcttgtggccttcgttggaaacgggatttcttgatattctgctagacagaagaattctcagtaacttccttgtgttgtgtgtattcaactcacagagttgaacgatcctttacacagagcagacttgaaacactctttttgtggaatttgcaagtggagatttcagccgctttgaggtcaatgttagaataggaaatatcttcctataaaaactagacagaaagattctcagaaactcctttgtgatgtgtgcgttcaactcacagagtttaacctttcttttcatagagcagttaggaaacactctgtttgtaaagtctgcaagtggatattcagacctctttgaggccttcgttggaaacgggtttttttcatataaggctagagagaagaattctcagtaacttccttgtgttgtgtgtattcaactgacagcgttgaactttcatttagagagagcagatttgaaacactgtttttgtggaatttgcaagtggagatttcaagcgctttggggccaaaggctgaaaaggaaatatcttcgtataaaaactagacagaatgattctcagaaactcctttgtgatgtttgctttcaaatcacagagtttaacctttcttttcatagagcagttaggaaacactctggttgtaaagtctgcaagtggatattttgaccacttagaggtcttcgttggaaacgggtttttttcatgtaaggctagacagaagaattcccagtaacttccttgtgttgtgtgcattcaactcacagagatgaacgttcccttagacagagcagatttgaaacactctatttgtgcaatttgcaagtgtagatttcaagcgctttaaggtcaatggcagaaaaggaaatatcttcgtttcaaaactagacagaatgattctcagaaactcctttgtgatgtgtgcgttcaactcacagagtttaacctttcttttcatagagcagttaggaaacactctgtttgtaaagtctgcaagtggatattcagacatctttgaggctttcgttggaaacgggatttcttcacattctgctagacagaagaattctcagaaacttcgttgtgttgtgtgttttcaactcacagagttcaacgatcctttacacagagcagacttgaaacactctttttgtggaatttgcaagtggagatttcagccattttgaggtcaacgttagaaaaggaaatatcttcgtataaaaactagacagaatgattctcaaaaactcctttgtgatgtgtgcgttcaactcacagagttcaacctttcttttcctagagcagttgggaaacactctgtttgtaaagtctgcaagtggatattcagacatccttgaggctttcgttggaaacgggatttcttcatattctgctatacagaagaattcccagtaacttccttgtgttgtgtgtgttcaactcacagagttgaactttcatttacacagagcagatttgaaacactctttttgtggaatttgcaattggagatttcaagcgctttgaggccaaaggcagaaaaggaaatatcttcgtttcaaaactagacagaatcattcccagaaactgctcggcgatgtgtgctttccactctcagagtttaacttttcttttcattcagcagtttggaaacactctttttttaaagtctgcacgtggatattttgacctcttagagtccttcgttggaaacgggtttttttcctgtaaggctagacagaagaattcccagtaacttccttgtgttgtgtacattcaactcacagagttgaacgttcccttagacagagcagatttgaaacactctttttgtgcaattggcaaatggagatttcaagggctttaaggtcaatggcagaaaaggaaatatcttcgtttcaaaactagacagaatcattcccacaaactgcgttgtgatgtgttcgttcaactcacagagtttaacctttctgttcatagagcagttaggaaacactctgtttgtaaagtctgtaagtggatattctgacatcttgtggccttcgttggaaacggtatttcttcctcttctgctagacagaagaattctcagtaacttccttgtgttgtgtgtatttaactcacagagttgaacgatcctttacacagagcagacttgaaacactctttttgtggaatttgcaagtggagatttcagccgctttgaggtcaatggtagaaaaggaaactatcttcatataaagactagacagaatgattctcagaaactcctttgtgatgtgtgcgttcaactcacagagtttaaccttacttttcatagagcagttaggaaacactctgtttgtaaagtctgcaagtggatattcagacatctttgaggccttcgtttgaaacgggatttcttcatgttctgctagacagaagaattcccagtaacttccttgtgttgtgtgtgttcaactcacagagttgaactttcatttacacagagcagatttgaaacactctttttgtggaatttgcaaatggagatttcaagcgctttgaggccaaaggcagaaaaggaaatatgttcgtataaaaactagacagaatcattctcagaaactgctctgcgatgtgtgcgttcaactctcagagtttaacttttcttttcattcagtagtttggaaacactctgtttgtaaagtctgcacgtggataacttgaccacttagaggccttcgttggaaacgggtttttttcatgtaaggctagacagaagaattcccagtaacttccttgtgttgtgtgcattcaactcacagagttgaacgttcccttagacagagcagatttgaaaaactctatttgtgcaatttgcaagtgtagatttcaagcgctttaaggtcaacaggcagaaaaggaaatatcttcgtttcaaaactagacagaatgattctcagaaactcctttgtgatgtgtgcgttcaactcacagagttcaacctttcttttcatagagcagttgggaaacactctgtttgtaaagtctgcaagtggatattcaggcttctttgaggccttcgttggaagcgggatttcttcatattcagctagacagaagaattctcagtaactgccttgtgttgtgtgtattcaactcacagagttgaacgatcctttacacagagcagacctgaaacactctttttgtggaatttgcaagtggagatttcagccgctttgaggtcaatggtagaataggaaatatcttcctatagaaattagacagaatgattctcagaaactcctttgtgatgtgtgtgttcaactcacagagtttaacctttcttttcatagagcagttagtaaacactctgtttataaagtctgcaagtggatattcagacccctttgaggccttcgttggaaacggtatttcttcatattatgctagacagaagaattcccagtaacttccttgtgttgtgtgtgttcaactcacagagttgaactttcatttacacagagcagatttgaaacactctttttgtggaatttgcaagtggagatttcaagcgctttgaggccaaaggcagaaaaggaaatatctccgtttcaaaactagacagaatcattctcagaaactgctctgcgatgtgtgcgttcaactctcagagtttaacttttcttttcattcagcagttcggaaacactctgtttgtaaagtctgcacgtggatattttgaccacttagaggccttcgttggaaacgggtttttttcctgtaaggctagacagaagaattctcagtaacttccttgtgttgtgtgtattcaactcacagagttgaacaatcttttacacagagcagacttgaaacactctttttgtggaatttgcaaatggagatttcagccgctttgaagtcaaaggtagaaagggaaatatcgtcgtataaaaactagacagaatgattctcagaaactcctttgtgatgtgtgcgttcaactcacagagtttaacctttcttttcatagagcagttaggaaacactctgtttgtaaagtctgcaagtagatattcagacctctttgaggccttcgttggaaacgggtttttttcatataaggctagacagaagaattcccagtaacatccttgtgttgtgtgtattcaactcacagagttgaactttcatttacacagagcagatttgaaacactctttttgtggtatttgcaagtggagatttcagtcgctttgatgtgaatgatagaaaaggaaatatcttcgtataaaaactagacagaatgattctcataaactcctttgtgatgtgtgcgttcaactcaccgagtttaacctttcttttcatagagcagttaggaaacactctgtttgtaaagtctgcaagtggatattcagacctctttgaggcattcattggaaacgggatttcttcatattctgctagacagaagaattcccagtaacttccttgtgttgtgtgtgttcaactcacagagttgaactttcatttacacagagcagatttgaaacactctttttgtggaatttgcaagtggagatttcaagcgctttgaggccaaaggcagaaaaggaaatatcttcgtataaaaactcgacagaatcattctcagaaactgctctgcgatgtgtgcgttcaactctcagagtttaacttttcttttcattcagcagtttggaaacactctgtttgtaaagtctgcacgtggatattttgaccacttagaggccttcgttggaaacgggtttctttcctgtaaggctagacagaagaattcccagtaacttccttgtgttgtgtgcattcaactcacagagttgaacgttcccttagacagagcagatttgaaacactctatttgtgcaatttgcaagtgtagttttcaagctctttaaggtcaacggcagaaaaggaaatatcttggtttcaaaactagacagaatcattcccacaaactgcgttgtgatgtgttcattcaactcacagagtttaacctttctgttcatagagcagttaggaaacactctgtttgtaaagtctgtaagtggatattctgacatcttgtggccttcgttggaaacgggatttcttcatattatgctagacagaagaattctcagtaacttccttgtgttgtgtgtattcaactcacagagttgaacgatcctttacacagagcagacttgaaacactctttttgtgtaatttgcaagtggagatttcagccgctttgaggtcaatagtagaaaaggaaatatcttcatagaaaaactagacagaatgattctcagaaactcctttgtgatgtgtgcgttcaactcacagagtttaacctttctttttatagagcagttaggaaacactctctaaagtctgcaagtggatattcagacctccttgaggtcttcgttggaaacgggatttcttcatattatgctagacagaagaattctcagtaacttccttgtgttgtgtgtattcaactgacagagttgaactttcatttagagagagcagatttgaaacactgtttttgtggaatttgcaagtggagatttcaagcgctttggggccaaaggcagaaaaggaaatatcttcgtgtaaaaactacacagaatcattctcagaaactgctctgcgatgtgtgcgttcaactctcagagtttaacttttcttttcattcagaagtttggaaacactctgtttgtaaagtctgcacgtggataacttgaccacttagaggccttcgttggaaacgggtttttttcatgtaaggctagacagaagaattcccagtaacttccttgtgttgtgtgcattcaactcacagagttgaacgttcccttagacagagcagatttgaaacactctatttgtgcaatttgcaagtgtagttttcaagctctttaaggtcaacggcagaaaaggaaatatcttcgtttcaaagctagacagaatgattctcataaactcctttgtgatgtgtgcgttcaactcacagagtttaacttttcttttcatatagcagttaggaaacactctgtttgtaaagtctgaaagtggatattcagacctctttgaggccttcgttggaaatgggatttcttcatattatgctagacagaagaattctcagaatcttccttgtgttgtgtgtattcaactcacagagttgaacgatcctttacacagagcagacttgaaacactctttttgtggaatttgcaagtggagatttcagccgctttgaggtccatggtagaaaaggaaatatcttcggataaaaactagacagaatgattctcagaaactcctttgtgatgtgtgcgttgaactcacagagtttaacttttcttctcatagagcagttaggaaacactctgtttgtaaagtctgcaagtggatattcagacctccttgaggccttcggggaaaacgggatttcttcatattctgctagacagaagaattcccagtaacttccttgtgttgtgtgtgttcaactcacagagttgaactttcatttacacagagcagatttgaaacactctttttgtggaatttgcaagtggagatttcaatcgctttgaggccaaaggcagaaaaggaaatatcttcgtttcaaaactagacagaaatcattctcagaaactgctctgcgatgtgtgcgttcaactctcaggagtttaacttttcttttcattcagcagtttggaaacactctgtttgtaaagtctgcacgtggatattttgaccacttagaggccttcgttggaaacgggtttttttcctgtaaggctagacagaagaattcccagtaacttccttgcgttgtgtacattcaactcacagagttgaacgttcccttagacagagcagatttgaaacactctttttgtgcaattggcaagtggagatttcaagcgctttaaggtcaatggcagaaaaggaaatatcttcgtttcaaaactagacagaatgattctcagaaactcctttgtgatgtgtgcgttcaactcacagagtttaacctttcttttcatagagcagttaggaaacactctgtttgtaaagtctgcaagtggatattcagacctccttgaggccttcgttggaaacgggatttcttcatactatgctagacagaagaattctcagtaacttccttgtgttgtgtgtattcaactcacagagttgaacgatcctttacacagagcagacttgtaacactctttttgtggaatttgcaagtggagatttcagccgctttgaagtcaaaggtagaaaaggaaatatcttcctattaaaactagacagaatgattctcagaaactcctttgtgatgtgtgcgttcaactcacagagtttaacttttcttttcatagagcaattaggaaacactctgattgtaaagtcttcaagtggatattcagacctctttgaggccttcgttggaaacgggatttcttcatattctgctagacagaagaattctcagtaacttccttgtgttgtgtgtattcaactgacagagttgaactttcatttagagagagcagatttgaaacactgtttttgtggaatttgcaagtggagatttcaagcgctttggggccaaaggcagaaaaggaaatatcttcgtataaaaactagacagaatcattctcagaaactgctgcgtgatgtgtgcgttcaactctcagagtttaacttttcttttcattcagctgtttggaaacactctgtttgtaaagtctgcacgtggaaattttgaccacttagaggccttcgttggaaacgggattttttcatgtaaggctagacagaagaattcgcagtaacttccttgtgttgtgtacattcaactcacagagttgaacgttcccttagacagagcagatttgaaacagtctttttgtgcaattggcaagtggagatttcaagcgctttaaggtcaatggcagaaaaggaaatatcttcgtttcaaaactagacagaatgattctcagaaactcctttgtgatgtgtgcgttcaactcacagagtttaacctttcttttcatagagcagttaggaaacactctgtttgtaaagtctacaagtggatattcggacctccttgaggccttctttggaaacgggatatcttcttattatgctacacagaaaaattctcagtaacttccttgtgttgtgtgtattcaactcacagagttgaatgatcctttacacagagcagacttgaaacactctttttgtggaatttgcaagtggagatttcagccgctttgaggtcaatggtagaataggaaatatcttcctatagaaactagacagaatgattctcagaaactcctttgtgatgtgtgtgttcaactcacagagtttaacctttcttttcatagagcagttagtaaacactctgtttataaagtctgcaagtggatactcagacccctttgaggccttcgttggaaacgggatttcttcatattatgctagacagaagaattcccactaacttccttgtgttgtgtgtgttcaactcacaagagttgaactttcatttacacagagcagatttgaaacactctttttgtggaatttgcaagtggagatttcaagcgctttgaggccaaaggcagaaaaggaaatatcttcgtttcaaaactagacagaatcattctcagaaactgctctgcgatgtgtgcattcaactctcagagtttaatttttcttttcattcagcagtttggaaacactctctttgtaaagtctgcacgtggatattttgaccacttagaggccttcgttggaaacgggttttattcctgtaaggctagacagaagaattcccagtaacttccttgtgttgtgtacattcaactcacagagttgaacgttcccttagacagagcagatttgaaatactctttttgtgcaattgggaaatggagatttcaagcgctttaaggtcaatggcagaaaaggaaatatcttcgtttcaaaactagacagaatgattctcagaaagttctttgcgatgtgtgcgttcaactcacagagtttaacctttcttttcatacagcagttaggaaacactctgtaaactctgcaagtggatattcagacctctttgaggccttcgttggaaacgggatttcttcatactatgctagacagaagaattctcagtaactttccttgtgttgtgtgtattcaactcacagagttgaacgatcctttacacagagcagacttgtaacactctttttgtggaatttgcaagtggagatttcagccgctttgaagtcaaaggtagaaaaggaaatatcttcctataaaacgacatagacagaatgattctcagaaactcctttgtgatgtgtgcgttcaactcacagagtttaacctttcttttcatagagcagttaggaaacactctgtttgtaaagtctgcaagtggatattcagacatccttgaggctttcgttggaaacgggatttcttcatgttctgctagacagaagaattcccagtaacttccttgtgttgtgtgtgttgaactcacagagttgaactttcatttacacagagcagatttgaaacactctttttgtggaatttgcaaatggagatttcaagcgctttgaggaaaaaggcagaaaagggaatatcttcgtataaaaactagacagaatgattctcagaaactcctttgtgatgtgtgtgttcacctcacagagtttaacttttcttttcattcagcggtttggaaacactctgtttgtaaagtctgcacgtggatattttgaccacttagaggccttcgttggaaacgggtttttttcatgtaaggctagacagaataattcccagtaacttctttgtgttgtgtacattcaactcacagagttgaacgttcccttagacagagcagatttgaaacactctttttgtgaaattggcaagtggagatttcaagcgctttaaggtcagtggcagaaaaggaaatatcttcgtttcaaaactagacagaatcattcccacaaactgcgttgtgatggttcgttcaactcacagagtttaacctttcttttcatagagcagttaggaaacagtctgtttgtcaattctgtaagtggatattctgacatcttgtggccttcgttggaaacgggatttcttcatattctcctagacagaagaattctcagtaacttccttgtgttgtgtgtattcaactcacacagttgaacgattctttacacagagcagacttgtaacactctttttgtggaatttgcaagtggagatttcagccgctttgaagtcaaaggtggaaaaggaaatatcttcctataaaaactagacagaatgattctcagaaactcctttgtgatgtgtgcgttcaactcacagagtttaacctttcttttcatagagcagttaggaaacactctgtttgtaaagtctgcaactggataatcagacctctttgaggccttcgttggaaacgggatttcttcatattttgctagacagaagaattctcagtaacttcctcgtgttgtgtgtattcaactcacagagttgagcgacgctttacacagagcagacttgaaacactctttttgtggaatttgcaaatggagatttcagccgctttgaggtcaatggttgaaaaggaaatatcttcatataaaaatttgacagaatcattctcagaaactgctctgcgatgtgtgcgttcaactctcagagtttaacttttcttttcattcagcagtttggaaacactctgtttgtaaagcctgcacgtggatattttgaccacttagaggccttcgttggaaacgggtttttttcctgtaaggctagacagaagaattcccagtaacttccttgtgttgtgtgcattcaactcacagagttgaacgttcccttagacagagcagattggaaacactctacttgtgcaatttgcaagtgtagatttcaagcgctttaaggtcaatggcagaaaaggaaatatcttcgtttcaaaactagacagaatcattcccacaaactgcgttgtgatgtgttcgttcaactcacagagtttaacctttctgttcatagagcagttaggaaacactctgtttgtaaagtctgtaagtggatattctgacatcttgtggcgttcgttggaaacgggatttcttcatattctgctagagagaagaattctcagtaacttccttgtgttgtgtgtattcaactcacagagttgaatgatgctttacacagaacagacttgaaacactcttgttgtggaattttaaagtggagatttcagccgctttgaggtcaacggtagaataggtaatatcttcctatagaaactagacagaatgactctcagaaactcctttgtgatgtgtgcgttcaactcacagagtttaacctttcttttcatagagcagttaggaaacactctgtttgtaatgtctgcaagtggatattcagacctctttgaggccttcgttggaaacgggatttcttcatattatgctagacagaagaattcccagtaacttccttttgttgtgtgtgttcaactcacagagttgaactttgatttacacagagcagatttgaaacactctttttgtggaatttgcaagtggagatttcaagcgctttgaggccaaaggcagaaaaggaaatatcttcgtataaaaactagacagaatgattctcagaaactcctttgtgatgtgtgcgatcaactcacagagtttaacctttcttttcatagagcagttaggaaacactctgtttgtaaagtctgcaagtggatattcagacctctttgaggccttcgttggaaacgggtttttttcatataaggctagacagaagaattcccagtaactttccttgtgttgtgtgcgttcaactcacagagttgaactttcatttacacagagcagatttgaaacactctttttgtggaatttgcaaatggagatttcaagcgctttgaggccaaaggcagaaaaggaaatgtacttcgtttcaaaactagacagagtgattctcatcaactcctttgtgatgtgtgcgttcaactcacagagtttaacctttcttttcatagagcagttaggaaacactctgtttgtaaagtctgcaagtggatattcagacctccttgaggccttctttggaaacgggatttcttcatattctgatagacagaagaattctcagtaacttccttgtgttgtgtgtattcaactcacagagttgaacgatcctttacacagagcagacttgaaacacactttttatggaatttgcaagtggagatttcagccgctttgaggtcaaaggtagaaaaggaaactatgttcgtataaagagtagacagaatgattctcagaaaatcctttgtgatgtgtgcgttcaactcacagagtttaacttttcttttcatagagcagttaggaaacactctgtttgtaaagtctgcaagtggatattcagacctctttgaggccttcgttggaaacgggatttcttcatattatgctagacagaagaattctcagtaacttccttgtgttgtgtgtattcaactgacagagttgaactttcatttagagagagcagatttgaagcactgtttttgtggaatttgcaagtggagacttcaagtgctttggggccaaaggcagaaaaggaaataccttcgtataaaaactagacagaatcattctccgaaactgctctgcgatgtgtgccttcagcgctcagagtttaacttttcttttcattcagcagtttggaaacactctgtttgtaaagtctgcacgtggatattttgaccacttagaggccttcgttggaaacgggtttttgtcatgtaaggctagacagaagaattcccagtaacttccttgtgttgtgtgcattcaactcacagagttgaacgttcccttagacagagcagatttgaaacactctatttgtgcaatttgcaagtgtagttttcaagctctttaaggtcaacggcagaaaaggaaatatcttcgtttcaaaactagacagaatcattcccacaaactgcgttgtgatgtgttcgttcaactcacagagtttaacctttccgttcatagagcagttaggaaacactctgtttgtaaagtctgtaagtggatattctgacatcttgtggccatcgttggaaacgggatttcttcatattctgctagacagaagaattctcagtaacttccttgtgttgtgtgtattcaactcacagagttgaacgatcctttacacagagcagacttgaaacactctttttgtggaatttgcaagtggagatttcagccgatttgaggtcaatggtagaaaaggaaatatcttcgtagaaaaactagacagaatgattctcagaaactcctttgtgatgtgtgcgttcaaatcacagagtttaacttttcttttcatagagcagttaggaaacactctgtttgtaaagtctgcaagtggatattcagacctctttgaggccttcgttggaaacgggatttcttcatattatgctagacaggaaaattcccagtaacttccttgtgttgtgtgtgttcaactcacagagttgaactttcatttacacagagcagatttgaaacactctttttgtggaatttgcaagtggagatttcaagcgctttgaggccaaaggcagaaaaggaaatatcttcgtataaaaactagacagaatcattctcagcaactgctgcgtgatgtgtgcgttcaactctcagagtttaccttttcttttcattcagcggtttggaaacactatgtttgtaaagtctgcacgtggatattttgaccacttagaggccttcgttggaaacgggattttttcatctaaggctagacagaagaattcccagtaacttccttgtgttgtgtgcattcaactcacagagttgaacgttcccttagacagagcagatttgaaacactctatttgtgcaattggcaactgtagatttcaagcgtttaaggtcaatggcagaaaaggaaatatcttcgtttcaaaactagacagaatgattctcagaaactcctttgtgatgtgtgcgttcaactcacagagtttaacctttcttttcatagagcagttaggaaacactctgtttgtaaagtctgcaagtggatattcagacatctttgaggctatagttggaaacgggatttcttcatgttctgctagacagaagaattctcagaaacttccttgtgttgtgtgttttcaactcacagagttgaacgatgatttacacagagtagacttgaaacactctttttgtgtaatttgcaagtggagatttcagccgctttgaggtcaatggtagaaaaggaaatatcttcgtataaaaactagacagaatgattctcagaaactcctttgtgatgtgtgcgttcaactcacagagtttaacctttcttttcatagagcagttaggaaacactctgtttgtaaagtctgcaagtggatattcagacctctttgaggccttcgttggaagcgggatttcttcatgttcaggtagacagaagaattctcagtaacttccttgtgttgtgtgtattcaactcacagagttgaacgatcctttccacagagcagacttgaaacactctttttgtggaatttgcaagtggagatttcagccgctttgaggtcaatagtagaaaaggaaatatctttacagaaaaactagacagaatcattctcagaaactgctgcgtgatgtgtgcgttcaactctcagagtttaacttttctttacattcagcggtttggaaacactctgtttgtaaagtctgcacgtggatattttgaccacttagaggccttcgttggaaacgggattttttcatgtaaggctagacagaagaattcccagtaacttccttgtgttgtgtacattcaactcacagagttgaaagttcccttagacagagcagatttgaaacactctttttgtgcaattggcaagtggagatttcaagcgctttaaggtcaatggcagaaaaggaaatatcttcgtttcaaaactagacagaatcattcccacaaactgcgttgtgatgtgttctttcaactcacagagtttaacctttcttttcatagagcagttaggaaacagtctgtttgtaaattctgtaagtagatattctgacatcttgtggccttcgttggaaacgggatttcttcatattctgctagacagaagaattctcagtaacttccttgtgttgtgtgtattcaactcaccgagttgaacgatcctttacacagagcagacttgaaacactctttttgtggaatttgcaagtggagatttcagccgctttgaggtcaatggcagaaaaggaaatatcttcctatagaaactagacagaatgattctcagaaaatcttttgtgatgtgtgcgttcaactcacagagtttaacttttcttctcatagagcagttaggaaagactctgtttgtaaagtctgcaagtggatattcagacctctttgaggtcttcgttggaaacgggatttcttcatattatgctagacagaagaattcccagtaacttccttgagttgtgtgtattgaactcacagagttgaactttcatttacacagagcagatttgaaacactctttttgtggtatttgcaagtggagatttcagcggctttggtgtcaatgatagaaaaggaaatatcttcgtataaaaactagacagaatcattctcagaaactgctgcgtgatgtgtgcgttcaactctcagagtttaacttttcttttcagtcagcggtttggaaacactctgtttgtgaagtctgcacgtggatattttgaccacttagaggccttcgttggaaacgggttttttgcatgtaaggctagacagaagaattcccagtaacttccttgtgttgtgtgtattcaactcacagagttgaacgatcttttacacagagcagacttgaaacactctatttgtgcaatttgcaagtgtagatttcaagcgctttaaggtcaatggcagaaaaggaaatatcttcgtttcaaaactagacagaatcattctcagaaactgctctgtgatgtgtgcgttcaactctcagagttaaacttttcttttcattcagcagtttggaaacactctgtttgtaaagtctgcacgtggataatttgaccacttagaggccttcgttggaaacgggtttttttcatgtaaggctagacagaagagttctcagtaacttccttgtgttgtgtgtattcaactcacacagttgaacgatcctttacagagagcagacttgtaacactctttttgtggaatttgcaagtggagatttcagccgctttgaagtcaaagtagaaaaggaaatatcttcctataaaaactagacagaatgattctcagaaactcctttgtgctgtgtgcgttcaactcacagagtttaacctttcttttcatagagcagttaggaaacactctgtttgttaagtctgcaggtggatattcagacctctttgaggccttcgttggaagcgggatttcttcatattatgctagacagaagaattcccagtaacttccttgtgttgtgtgtgttcaactcacagagttgaactttgatttacacagagcagatttgaaacactctttttgtggaatttgcaagtggagatttcaagcgctttgaggccaaaggcagaaaaggaaatatcttcgtataaaaactggacagaatcattctcagaaactgctctgcgatgtgtgcgttcaactctcagagtttaacttttcttttcattcagcagtttggaaacactctgtttgtaaagtctgcacgtggataacttgaccagttagaggccttcgatggaaacgggtttttttcatgtaaggctagacagaagaattcccagtaacttccttgtgttgtgtgcattcaactcacagagttgaacgttcccttcgacagagcagatttgaaacactctatttgtgcaatttgcaagtgtagatttcaagcgctttaaggtcaacggcagaaaaggaaatatcttcgtttcaaaactagacagaatgattctcagaaactcctttgtgatgtgtgcgttcaactcacagagtttaacctttcttttcatagagcagttaggaaacactctgtttgtaaagtctgcaagtggatattcagaaatctttcaggctttcgttggaaaagggatttcttcatattctgctagacagaagaattctcagaaagttcgttgtgttgtgtgttttcaactcacagagttcaacgatcctttacacagagtagacttgaaacaccctttttgtggaattggcagggtggagatttcagccgctttgaggtcaatggtagaataggaaatatcttcgtataaaaactagacagaatgattatcagaaactcctttgtgatgtgtgcgttcaactcacagagtttaacctttcttttcatagagcagttaggaaacactctgtttgtaaagtctgcaagtggatattcagacctccttgaggccttcgttggaaacgggatttcttcatattatgctagacagaagaattcccagtaacttccttgtgttgtgtgtgttcaacacacagagttgaactttcatttacccagagcagatttgaaacactctttttgtggaatttgcaagtggagatttcaagcgctttgaggccaaaggcagaaaaggaaatatcttcgtttcaaaactagacagaatcattctcagaaactgctgcgtgatatgtgcgttcaactctcagagtttaacttttcttttcattcagcggtttggaaacactctgtttgtaaagtctgcacgtggatattttgaccacttagaggccttcgttggaaacgggtttttttcatgtaaggctagacagaagaattcccagtaacttccttgtgtggggtgcattcaactcacagagttgaacgttctcttagacagagcagatttgaaacactctatttgtgcaatttgcaagagtagatttcaagcgctttaaggtcaatggcagaaaaggaaatatcttcgtttcaaaactagacagaaatcattcccacaaactgcgttgtgatgtgttcgttcaactcacagagtttaacctttcttttcatagagcagttaggaaacagtctgtttgtaaattctgtaagtggatattctgacatcttgtggccttcgttggaaacgggatttcttcatattctgctagacagaagaattctcagtaacttccttgtgttgtgtgtattcaactcacagagttgaacgatcctttacacagagcagacttgaaacactctttttgtggaatttgcaagtggaggtttcagccgctttgaggtcaatagtagaaaaggaaatatcttcctagaaaaactagacagaatgattctcagaaactcctttgtgatgtgtgcgttcaactcacacagtttaacctttcttttcatagagcagttaggaaacactctgtttgtaaagtctgcaagtggatattcagacctccttgaggcattcgttggaaacgggatttcttcatattctgctagacagaagaattctcagtaacttccttgtgttgtgtgtattcaactcacagagttgaacgatcctttacacagagcagacttgaaacactctttttgtggaatttgcaagtggagatttcagccgctttgagttcaatggtagaataggaaatatcttcatatagaaactagacagaatcattctcagaaactgctctgcgatgtgtgcgttcaactctcagagtttaacttttcttttcattcagcagtttggaaacactctgtttgtaaagtctgcacgtgcataatttgaccacttagaggccttcgttggaaacgggtttttttcatgtaaggctagacagaagaattctcagtaacttccttgtgttgtgtgtattcaactcacagagttgaacgatcctttacacagagcagacttgtaacactctttttgtggaatttgcaagtggagatttcagccgctttgaagtcaaaggtagaaaaggaaatatcttgctataaaaactagacagaatcattcccacaaactgctttgtgatgtgttggttcaactcacagagtttatcctttctgttcatagagcagttaggaaacactctgtttgtaaagtctgtaagtggttataatgatatcttgtggccttcgttggaaacgggatttcttcatattctgctagacagaataattctcagtaacttccttgtgttgtgtgtattcaactcacagagttgaacgatcctttacacagagcagacttgaaacactctttttgtggaatttgcaactggagatttcagccgctttgaggtcaatggtagaataggaaatatcttcctatagaaactagacagaatgattctcagaaactcctttgtgatgtgtgcgttcaactcacagagttcaacctttcttttcatagagcagttgggaaacactctgtttgtaaagtctgcaagtggatattcagacttctttgaggccttcgttggaagcggggtttcttcatgttctgctagacagaagaattcccagtaacttccctgtgttgtgtgtgttcaactcacagagttgaactttcatttacacagagcagatttgaaacactctttttgtggaatttgcaaatggagatttcaagcgctttgaggccaaaggcagaaaaggaaatatcttcgtttcaaaactagacagaatcattctcagtaaactgctgcgtgatgtgtgcgttcaactctcagagtttaacttttcttttcattcagcggtttggaaaccctctgtttgtaaagtctgcacgtggatattttgaccacttagaggccttcgttggaaacgggttttttttcatgtaaggctagacagaagaattcccagtaacttccttgttttgtgtacattcaactcacagagttgaacgttcccttagacagagcagatttgaaatactctttttgtgcaattggcaagtggagatttcaagcgctttaaggtcaatggcagaaaaggaaatatcttcgtttcaaaactagacagaatcattcccacaaactgcgttgtgatgtgttcgttcaactcacagagtttaacctttcttttcatagagcagttaggaaacagtctgtttgtaaattctgtaagtggatattctgacatcttgtgaccttcgttggaaacgggatttcttcatattctgctagacagaagaattctcagtaacttccttgtgttgtgtgtattcaactcacagagttgaacgatcctttacacagagcagacttgaaacactccttttgtggaatttgcaagtggagatttcagccgctttgaggtcaatggtagaacaggaaatatcttcctatagaaactagacagaatgattctcagaaactcctttgtgatgtgtgcgttcaactcacagagtttaacctttcttttcatagagcagttaggaaacactctgtttgtaaagtctgcaagtggatattcagacctccttgatggccttcgttggaaaagggatttcttcatattatgctagacagaagaattcccagtaacttctttgtgttgtgtgtgttcaactcacacagttgaactttcatttacacagagcagatttgaaacactctttttgtggaatttgcaagtggagatttcaagcgctttgaggccaaaggcagaaaaggaaatatcttcgtttcaaaactagacagaatcattctcagaaactgctgcgtgatgtgtgcgttcaactctcagagtttaacttttcttttcattcagcggtttcgaaactctctgtttgtaaagtctgcacgtggatattttgaccacttagaggccttcgttggaaacgagtttttttcatgtaaggctagacagaagaattcccagtaacttccttgtgttgtgtgcattcaactcacagagttgaacgttcccttagacagagcagatttgaaacactctatttgagcaatttgcaagtgtagatttcaagcgctttaaggtcaatggcagaaaaggaaatatcttcgtttcaaaactagacagaatcattcccacaaactgcgttgtgatgtgttcgttcaactcacagagtttaacctttcttttcatagagcagttaggaaacagtctgtttgtaaattctgtaagtggatattctgacatcttgtggccttcgttggaaacgggatctcttcatattctgctagacagaagaattctcagtaacttccttgtgttgtgtgtattcaactcacagagttgaacgatcctttacacagagcagaattgaaacattctttttgtggaatttgcaagtggagatttcagccgctttgaggtcaatggtagaataggaaatatcttcctatagaaactagacagaatgattctcagaaactcctttgtgatgtgtgtgttcaactcacagagtttaacctttcttttcatagagcagttaggaaacactctgtttgtaaagtcttcaagtggatattcagacctctttgaggccttcgttggaaacgggtttttttcatataaggctagacagaagaattcccagtaacttccttgtgttgtgtgtgttcaactcacagagttgaactttcatttacacagagcagatttgaaacactctttttgtggaatttgcaaatgcagatttcagccgcgttgaggtcaatggtagaaaaggaaatatcttcgtttcaaaactagacagaatcattctcagaaactgctctgcgatgtgtgcgttcaactctcagagtttaacttttcttttcattcagcagtgtggaaacactctgtttgtaaagtctgaaggtggatattttgaccacttagaggccttcgttggaaacgggtttttttcctgtaaggctagacagaagaattctcagtaacttccttgtgttgtgtacattcaactcacagagttgaacgttcccttagacagagcagatttgaaacactctttttgtgcaattggcaagtggagatttcaagcgctttaaggtcaatggcagaaaaggaaatatcttcgtttcaaaactagacagaatcattccaacaaactgcgttgtgatgtgttcgtttaactcacagagtttaacctttcttttcatagagcagttaggaaacagtctgtttgtaaattctgtaagtggatattctgacatcttgtggccttcgttggaaacgggatttcttcatattctgctagacagaagaattctcagaatcttccttgtgttgtgtgtattcaactcacagcagttgaacgatggtttacacagagcagatttgaaacactctttttgtggaatttgcaagtggagatttcagccgctttgaggtcaatggtagaaaaggaaatatcttcgtataaaaactagacagagagagattctcagaactcctttgtgatgtgtgcgttcaactcacagagttcaacctttcttttcatagagcagttgggaaacactctgtttgtaaagtctgcaagtggatattcagacttctttgaggccttcgttggaagcgggatttcttcatattctgctagacagagaattctcagtaacttccttgtgttttgtgtattcaactgacagagttgaagtttcatttagagagagcagatttgaaacactgtttttgtggaatttgcaagtggagatttcaagcgctttgggaccaaaggcagaaaaggaaatatcttcgtatataaactagacagaatcattctcagaaactgctgcgtgatgtgtgcgttcaactctcagagtttaacttttcttttcattcagccgtttggaaacactctgtttgtaaagtctgcacgtggaaattttgaccacttagaggccttcgttggaaacgggtttttttcatgtaaggctagacagaagaattcccagtaacttccttgtgttgtgtgcattcaactcacagagttgaacgttcccttagaccgagcagatttgaaacactctatttgtgcaatttgcaagtgtagttttcaagctctttaaggtcaacggcagaaaaggaaatatcttcgtttcaaaactagacagaatgattctcagaaactcctttgtgatgtgtgcgttccactcacagagttcaacctttcttttcatagagcagttgggaaacactctgtttgtaaagtctgcaagtggatattcagacttctttgaggccttcgttggaagcgggatttcttcatattctgctagacagaagaattctcagtaacttccttgtgttgtgtgtattcaactcacagagttgaatgatcctttacacagaacagacttgaaacactcttgttgtggaatttgcaagtggagatttcagccgctttgaggtcaacggtagaataggaaatatcttcctataaaaactagacagaatgattctcagaaactcctttgtgatgtgtgcgttcaactcacagagtttaacctttcttttcatagagcagttaggaaacactctgtttgtaaagtctgcaggtggatattcagacatctttgaggctttcgttggaaacggcatttcttcatattctgctatacagaagaattcccagtaacttccttgtgttgtgtgtgttgaactcacagagttgaactttcatttacacagagcagatttgaaaccctctttttgtggaatttgcaagtggagatttcaagcgctttgaggccaaaggcagaaaaggaaatatcttcgtttcaaaactagacagaatgattctcagaaactcctttgtgatgtgtgcgttcaactcacagagtttaacctttcttttcatagagcagttaggaaacactatgtttgtaaaatctgcacgtggatattttgaccacttagaggccttcgttggaaacgggttttttcatgtaagggtagacagaagaattcccagtaacttccttgtgttgtgtacattcaactcacagagttgaacgttcccttagacagagcagatttgaaacactctttttgtgcaattggcaaatggagatttcaagcgctttaaggtcaatggcagaaaagggaatatcttcgtttcaaaactagacagaatcattcccacaaactgcgttgtgatgtgttcgttcaactcacagagtttaacctttcttttcatagagcagttaggaaacactcagtttgtaaagtctgcaagtggatattcagacctctttgaggccttcgttggaaacgggatttcttcatactgtgctagacagaagaattctcagtaacttccttgtgttgtgtgtattcaactcacagagttgaacgatcctttacaaagagcagacttgtaacactctttttgtggaatttgcaagtggagatttcagccgctttgaagtcaaaggtagaaaaggaaatatcttcctataaaaactagacagaatgattctcagaaactcctttgtgatgtgtgcgttcaactcacagagtttaacctttcttttcatagagcagttaggaaacactctgtttgtaaagtctgcacgtggatatttggacttctttgaggccttcgttggaaacggggttttttcatgtaaggctagatagaagaattcccagtaacttccttgtgttgtgtgtcttcaactcacagagttgaactttcatttacacagagcagatttgaaacactctttttgtggaatttgcaaatggagatttcaagcgctttgaggccaaaggcagaaaaggaaatatcttcgtataaaaactagacagaatcattctcagaaactgctgcgtgatgtgtgcgttcaactctcagagtttaacttttcttttcattcagcggtttggaaacactctgtttgtaaagtctgcacgtggatattttgaccacttagaagccttcgttggaaacgggttttttcatgtaaggctagacagaagaattcccagtaacttccttgtgttgtgtgcattcaactcacagagttgaacgttcccttagacagagcagatttgaaacactctatttgtgcaatttgcaagtgtagatttcaagcgctttaaggtcaaaggcagaaaaggaaatatcttcgtttcaaaactagacagaatgattctcagaaactcctttgtgatgtgtgtgttcaactcacagagtttaacctttctattcatagagtagttaggaaacactctgtttgtaaagtctgcaagtgggtattttgacctctttgagacctcctttggaaacgggtttttttcatgtaaggctagacagaagaattctcagtaacttccgcgtgttgtgtgtattcaactcacagagttgaacgatcctttacacagagcagacttgtaacactctttttgtggaatttgcaagtggagatttcagccgctttgaagtcaaaggtagaaaaggaaatatcttcctataaaaaatagacagaatgattctcagaaactcttttgtggtgtgtgcgttcaactcacagagtttaacctttctgttcatagagcagttaggaaacactctgtttgtaaagtctgcaagtggatattcagacctccttgaggccttcgttggaaaccggatttcttcatattctgctagacagaagaattctcagtaatttccttgtgttgtgtgtattcagctgacagagttgaactttcatttagagagagcagatttgaaacactgtttttgtggaatttgcaagtggatatttcaagcgatttgaggccaaaagcagaaaaggaaatatcttcgtataaaaactagacagaatcattctcagtaaactgctctgcgatgtgtgcgttcaactctcagagtttaacttttcttttcattcagcagtttggaaacactctgtttgtaaagtctgcacgtggatattttgaccatttagaggccttcgttggaaacgggtttttttcttgtaaggctagacagaagaattctcagtaacttccttgtgttgtgtgtattcaactcacagagttgaatgatcctctacacagagtagacttgaaacactctttttgtgtaatttgcaagtggagatttcagccgctttgaggtcaatggtagaaaaggaaatatcttcgtataaaaactagacagaatgattatgagaaactcctttgtgatgtgtgcgttcaactcacagagtttaacctttcttttcatagagcagttaggaaacactctgtttgtaaagtctgcaagtggatattcagacctccttgaggccttcgttggaaacgggatttcttcatattatgctagacagaagaattctcagtaacttccttgtgttgtgtgtattcaactcacagagttgaacgatcctttacacagagcagacttgaaacactctttttgtggaatttgcaagtggagacttcagccgctttgaggtcaatggtagaataggaaatatcttcctatagaaactagacagaatgattctcagaaactcctttgtgatgtgtgcgttcaactcacacagtttaacctttcttttcatagagcagttaggaaacactctgtttgtaaagtctgcaagtggatattcagacctccttgatccattcgttggaaatgggaattcttcatattatgctagacagaagaattctcagtaacttccttttgttgtgtgtattcaactgacagagttgaactttcatttagagagagcagatttgaaacactgtttttgtgcaatttgcaagtggagatttcaagcgctttggggcaaaaggcaggaaaggaaatatcttcgtataaaaactagacagaatcattctcagaaaccgctctgtgatgtgtgcgttcaactctcagagtttaacttttcttttcattcagcagtttggaaacactctgtttgtaaagtctccacgtggatattttgaccacttagaagccttcgttggaaacgagttttttttcatgtaaggctagacagaagaattcccagtaacttccttgtgttgtgtgcattcaactcacagagttgaacgttcccttagacagagcagatttgaaacactctatttgtgcaacttgcaagtgtagatttcaagcgctttaagctcaatggcagaaaaggaaatatcttcgtttcaaaactagacagaatcatttccacaaactgcgttgtgatgtgttccttcaactcacagagtttaacctttcttttcatagagcagttaggaaacactctgtttgtaaactctgcaagtggatattcagacctctttgaggccttcgttggaaacgggatttcttcatactatgctagacagaagaattctcagtaacttccttgtgttgtgtgtattcaactcacagagttgaacgatcctttatacagagcagacttgaaacactctttttgtggaatttgcaagtggagatttcagccgcgttgaggtcaatggtagaaaaggaaatatcttcgtataaaaactagacagaatgattctcagaaaatcttttgtgatgtgtgcgctcaactcacagagtttaacttttcttctcatagagcagttaggaaacactctgtttgtaaagtgtgcaagtggatattcagacctctttgaggccttcgttggaaacgggatttcttcatattatgctagacagaagaattctcagtaacttccttgtgttgtgtgtattcaactgacagagttgaactttcatttagagagagcagatttgaaacactgtttttgtggaatttgcaagtggagatttcaagcgctttggggccaaaggcagcaaaggaaatatcttcgtataaaaactagacagaatcattctcagaaactgctgcgtgatgtgtgcgttcaactctcagagtttaacttttcttttgattcagcggtttggaaacactctgtttgtaaagtctgcacgtggatattttgaccacttagaggccttcgttggaaacgggtttttttcatgtaaggctagacagaagaattcccagtaacttccttgtgttgtgtacattcaactcccagagttgaacgttcccttagacagagcagatttgaaacactctttttgtgcaattggcaagtggtgatttcagccgctttggggtcaatggtagaaaaggtaatatcttcgtataaaaactagacagaatcattcccacaaactgcgttgtgatgtgttcgttcaactcacagagtttaacctttctgttcacagagcagttaggaaacactctgtttgtaaagtctgtaagtggatattctgacatcttgtggccttcgttggaaacgggatttcttcatattctgctagacagaagaattctcagtaacttccttctgttgtgtgtattcaactcacagagttgaacgatcctttacacagagcagtcttgaaacactctttttgtggaatttgcaagtggagatttcagccgctttgtggtcaatggtagaataggaaatatcttcctatagaaactagacagaatgattctcagaaactcctttgtgatgtgggcgttcaactcacagagtttaacctttcttttcatagagcagttaggaaacactctgtttgtaaagtctgcatgtggatatttggacttctttgaggccttcgttggaaacgggtttttttcatgtaaggctagacagaagaattcccagtaacttccttctgttgtgtgtgttcgactcacagagttgaactttcatttacacagagcagatttgaaacactctttttgtggaatttgcaagtggagatttcaagcgctttgaggccaaaggcagaaaaggaaatatcttcgtttcaaaactagacagaatcattctcagaaactgctgcgtgatgtgtgcgttcaactctcagagtttaacttgtcttttcattcagcggtttggaaacactctgtttgtaaagtctgcacgtggatattttgaccacttagaggccttcgttggaaacgggtttttttcatgtaaggctagacagaagaattcccagtaacttccttgtgttgtgtgcattcaagtcacagagttgaacgtttccttagacagagcagaattgaaacactctatttgtgcaatttgcaagtgtagatttcaagcgctttaaggtcaatggcagaaaaggaaatatcttcgtttcaaaactagacagaatcattcccacaaactgcgttgtgatgtgttcgttcaactcacagagtttaaccttccttttcatagagcagttaggaaacagtctgtttgtaaattctgtaagtggatattctgacatacttgtggccttcgttggaaacgggatttcttcatattctgctagacagagagattctcagtaacttccttgtgttgtgtgtattcaactcacagagttgcacgatcctttacacagagcagacttgaaacactctttttgtggaatttgcaagtggagatttcagccgcgttgaggtcaatggtagaagaggaaatatcttcgtataaaaactagacagaatgattctcataaactcctttgtgatgtgtgcgttcaactcacagagtttaacctttcttttcatagagcagttaggaaacactctgtttgtaaagtctgcaagtggatattcagacccctttgaggccttcgttggaaacgggatttcttcatattctgccagacaaaagaattcccagtaacttccttgtgttgtgtgtgttcaactcacagagttgaactttgatttacacagagcagatttgaaacactctttttgtggaatttgcaaatggagatttcaagcgctttgaggccaaaggcagaaaaggaaatatcttcgtataaaaactagacagaatcattctcagaaactgctctgcgatgtgtgcgttcaactctcagagtttaacttttcttttcattcagcagtttggaaacactctgtttgtaaagtctgcacgtggatattttgaccacttagaggtcttcgttggaaacgggtttttttcctgtaaggctagacagaagaattcccagtaacttccttgtgttgtgtgcattcaactcacagagttgaacgttcccttagacagagcagatttgaaacactctatttgtgcaatttgcaagtgtagttttcacgctctttaaggtcaacggcagaaaaggaaatatcttcgtttcaaaactagacagaatcattcccacaaactgcgttgtgatgtgtgcgttcaactcacagagtttaacttttcttttcatagagcagttaggaaacactctgtttgtaaagtctgcaagtggatattcagacctctttgaggccttcgttggaaacgggatttcttcatattctgctagacagaagaattctcagtaacttccttgtgttgtgtgtattcaactcacagagttgaacgatcctttacacagagcagacttgaaacactctttgtgtggaatttgcaagtggagatttcagccgctttgaggtgaatggtagaaaaggaaatatcttcgtataaagactagacagaatgattctcagaaactcctttgtgatgtgtgcgttcaactcacagagttcaacctttcttttcatagagcagttgggaaacactctttttgtaaagtctgcaagtggatattcagacttctttgaggccttcgttggaagcgggatttcttcatattctgctagacagaagaattcccagtaacttccttgtgttgtgtgtgttcaactcacagagttgaactttcatttacacagagcagatttgaaacactctttttgtggaatttgcaagtggagatttcaagcgctttgaggccaaggcagaaaaggaaatatcttcgtataaaaactagacagaatcattctcagaaactgctctgcgatgtgtgtgttcacctctcagagtttaacttttcttttccttcagcagtttggaaacactctgtttgtaaagtctgcacgtggataatttgaccacttagaggccttcgttggaaacgggtttttttcatgtaaggctagacagaagaattcccagtaacttccttgtgttgtgtacattcaactcacagagttgaacgttcccttagacagagcagatttgaaacactctttttgtgcaattggcaagtggagatttcaagcgctttaaggtcaatggcagaaaaggaaatatcttcgtttcaaaactaggcagaatgattctcagaaacttcattgtgatgtgtgcgttcaactcacagagtttaacctttcttttcatagagcagttaggaaacactctgtttgtaaactctgcaagtggatattctgacctcattgaggccttcgatggaaacgggatttcttcatactatgctagacagaagaattcacagtaacttccttgtgttgtgtgtattcaactcacagagttgaacgatcctttacacagagcagacttgaaacactctttttgtggaatttgcaagtggagatttcagccgctttgaggtcaatggtagaaaaggaaatatcttcgtataaaaactagacagaatgattctcagaaactcctttgtgatgtgtgcgttcaactcacagagtttaacctttcttttcatagagcagttaggaaacactctgtttttatagtctgcaagtggatattcagacatctttgaggccttcgttggaagcgggatttcttcatattctgctatacagaagaattctcagtaacttccttgtgttgtgtgtattcaactgacagagttgaactttcatttagagagagcagatttgaaacactgtttttgtggaatttgcaagtggagatttcaaacgctttggggccaaaggcagaaaaggaaatgtcttcgtataaaaactagacagaatcattctcagaaactgctctgcgatgtgtgtgttcaactctcagagtttaacttttcttttcattcagcagtttggaaacactctgtttgtaaagtctgcacgtggatattttgaccacttagaggccttcgttggaaacgggtttttttcttgtaaggctagacagaagaattcctagtaacttccttgtgttgtgtacattcaactcacagagttgaacgttcccttagacagagcagatttgaaacactctttttgtgcaattggcaagtggtgatttcagccgctttgaggtcaatggtataaaaggaaatatcttcgtattaaaactagacagaatcattcccacaaactgcgttgtgatgtgttcgttcaactcacagagtttaacctttctgttcatagagcagttaggaaacactctgtttgtaaagtctgtaagtggatattgtgacatcttgtggccttcgttggaaacgggatttcttcatattctgctagacagaagaattctcagtaacttccttgtgttgtgtgtattcaactcacagagttgaatgatcctttacacagaacagtcttgaaacactctttttgtggaatttacaagtggagatttcagccgctttgaggtcaatggtagaataggaaatatctgcctatagaaactagacagaatgattctcagaaactcctttgtgatgtgtgcgttcaacacacagagtttaacttttcttttcatagagcagttaggaaacactctgtttgtaaggtctgcaagtggatattcagacctctttgaggccttcgttggaaacgggatttcttcatattctgctagacagaagaattctcagtaacttccctgtgttctgtgtattcaactcagagagttgaacgatcctttacagagagcagacttgaaacactctttttgtggaatttgcaagtggagatttcagccgctttgaggtcaatggtagaaaaggaaatatcttcgtataaagactagacagaatcattctcagaaactgctctgcgatgtgtgcgttcaactctcagagtttaacttttcttttcattcagcagtttggaaacactctgtttgtaaagtctgcacatggatattttgaccacttagaggccttcgttggaaacgggtttactttacctgtaaggctagacagaagaattcccagtaacttccttgcgttgtgtacattcaactcacagagttgaacgttcccttagacagagcagatttgaaacactctttttgtgcaattggcaagtggagatttcaagcgctttaaggtcaatggcagaaaaggaaatatcttcgtttcaaaactagacagaatcattcccacaaactgcgttgtgatgtgttcgttcaactcacagagtttaacctttctgttcatagagcagttaggaaacactctgtttgtaaactctgtaagtggatattctgacatcttgtggccttcgttggaaacgggatttcttcacattctgctagacagaggaattctcagaaacttccttgtgttgtgtgtattcaactcacagagttgaacgatcctttacacagagcagacttgaaacactctttttgtggaatttgcaagtggagatttcagccgctttgaggtcaatggtagaaaaggaaatatcttcgtataaaaacaagacagaatgattctcagaaactcctttgtgatgtgtgcgttgaactcacagagtttaacctttcttttcatagagcagttaggaaacactctgtttgtaaagtctgcaagtggatattcattcctctttgaggccttcgttggaaacgggatttcttcatattatgctagacagaagaattcccagtaacttccatgtgttgtgtgtgttcaactcacagagttgaactttcatttacacagagcagatttgaaacactctttttgtggaatttgcaaatggagatttcaagcgctttgaggccaaaggcagaaaaggaaatatcttcgtataaaaattagacagattcattctcagaaactgctctgcgatgtgtgcgttcaactctcagagtttaacttttcttttcattcagcagtttggaaacactctgtttgtaaagtctgcacgtggataatttgaccacttagaggtcttcgttggaaacgggtttttttcatgtaaggctagacagaagaattcccagtaacttccttgtgttgtgtgcattcaactcacagagttgaacgttcccttagacagagcagatttgaaacactctatttgtgcaatttgcaagtgtagatttcaagcgctttaaggtcaacggcagaaaaaggaaatatcttcgtttcaaaactagacagaacgattctcagtaaactcctttgtgatgtgtgcgttgaactcacagagtttaacctttcttttcatagagcagttaggaaacactctgtttgtaaagtctgcaagtggatattcagacctctttgaggccttcgttggaaacgggatttcttcatattctgctagacagaagaattctcagaatcttccttgtgttgtgtgtattcaactcacacagttgaacgatggtttacacagagcagatttgaaacactctttttgtggaatttgcaagtggagatttcagccgctttgaggtccatggtagaaaaggaaatatcttcgtataaaaactagacagaatgattctcagaaacttctttgtgatgtgtgcgttcaactcacagagtttaacctttcttttcatagagcatttaggaaacactctgtttgtaaactctgcaagtggatattcagacctgtttgaggccttcgttggaaacgggatttcttcatactatggtagacagaagaattctcagtaacttccttgtgttatgtgtattcaactgacagagttgaactttcatttagagagagcagatttgaaacactgtttttgtggaatttgcaagtggagatttcaagcgctttggggccaaaggcagaaaaggaaatatcttcgtataaaaactagacagaataattctcagaaactgctgcgtgatgtgtgcgttcaactctcagagtttaacttttcttttcattcagcggtttggaaacactctgtttgtaaagtctgcacgtggatattttgaccacttagaggccttcgttggaaacgggtttttttcatgtaaggctagacagaagaattcccagtaacttccttgtgttgtgtatgttcaactcacagagttgaactttcatttacacagagcagatttgaaacactctttttgtggaatttgcaaatggagatttcaagcactttgaggccaaaggcagaaaaggaaatgtcttcgtttcaaaactagacagaatcattcccacaaactgcgttgtgatgtgttcgttcaactcacagagtttaacctttctgttcatagagcagttaggaaacactctgtttgtaaagtctgtaagtggatattctgacatctagtggccttcgttggaaacgggatttcttcatattctgctggacagaataattctcagtaacttccttgtgttgtgtgtattcaactcacagagttgaacgatcctttacacggagcagacttgaaacattctttttgtggaatttgcaagttgagatttcagccgctttgaggtcaatggtagaataggaaatatcttcctatagaaactagacagaaagattctcagaaactcctttgtgatgtgtgtgttcaactcacagagtttaacctttcttttcatagagcagttagtaaacactctgtttataaagtctgcaagtggatattcagacccctttgaggccttcgttggaaacgggatttcttcatattatgctagacagaagaattctcagtaacttccttgtgttgtgtgtattccactcacagagttgaacgatcatttacacagagcagatttgagacactctttttgtggaatttgctaatggagatttcaagcgctttgaggccaaaggcagaaaaggaaatatcttcgtataaaaactagacagaatcattctcagaaactgctctgcgatgtgtgcgttcaactctcagagtttaacttttcttttcattcagcagtttggaaacactctgtttgtaaagtctgcacgtggataatttgaccacttacaggccttcattggaaacgggtttttttcctgtaaggctagacagaagaattcccagcaacttccttgtattgtgtgcattcaactcacagagttgaacgatcctttacacagagcagatttgaaacactctatttgtgcaatttgcaagtgtagatttcaagcgctttgaggtcaatggcagaaaaggaaatatcttcgtttcaaaactagacagaatcattcccacaaactgcgttgtgatgtgttcgttcaactcacagagtttaacctttctgttcatagagcagttaggaaacactctgtttgtaaagtctgtaagtggatattctgacatcttgtggccttcgttggaaacgggatttcttcatattatgctagaaagaagaattcccagtagcttccttgtgttgtgtgtattcaactcacagagttgaattttcatttacacagcacagatgtgaaacactcttgttgtggtatttgcaattggagatatcagccgctttgatgtcaatgatagaaaaggaaatatcttcgtataaaaactagacagaatgattctcagaaactcctttgtgatgtgtgcgttcaactcacagagtttaacctttcttttcatagagcagttaggaaacactctgtttgtaaagtctgcaagtggatattcagacctctttgaggccttcgttggaatcgggatttcttcatattatgctagacagaaggattcccagtaacttccttgtgttgtgtgtgttcaactgacagagttgaactttcatttacaaagagcagatttgaaacactctttttgtggaatttgcaattggagatttcaagcgctttgaggccaaaggcagaaaaggaaatatcttcgtataaaaactagacagaatcattctcagaaactactgtgtgatgtgtgcgttcaactctcagagtttaacttttcttttcattcagcagtttggaaacactctgtttgtaaagtctgaacgtggatattttgaccacttagaggccttcgttggaaacgggtttttttcctgtaaggctagacagaagaattctcagtaacttccttgtgttgtgtacattcaactcacagagttgaacgatcctttacacagagcagacttgtaacactctttttgtggaatttgcaagtggagatttcagccgctttgaagtcaaaggtagaaaatgaaatatcttcctataaaaactagacagaatgattctcagaaactcctttgtgatgtgtgcgttcaactcacagagttcaacctttcttttcatagagcagttgggaaacactctgtttgtaaagtctgcaagtggatattcagacttctttgaggccttcgttggaagcgggatttcttcatgttctgttagacagaagaattctcagtaacttccttgtgttgtgtgtattcaactcacagagttgaacgatcctttacacagagcagacttgaaagactctttttgtggaatttgcaagtggagatttcagccgctttgatgtcaatggtagaaaaggaaatatcttcgtataaagactagatagaatgattctcagaaactcctttgtgatgtgtgcgttcaactcacagagtttaacctttcttttcatagagcagttaggaaacactctgtttgtaaagtctgcaagtggatattcaggcatccttgaggctttcgttggaaacgggatttcttcatattctgctagaaagaagaattcccagtaacttccttgtgttgtgtgtgttcaactcacagagttgaactttcatttacacagagcagatttgaaacactctttttgtggaatttgcaagtggagatttcaagcgctttgaggccaaaggcagaaaagaaggaaatatcttcgtataaaaactagacagaatcattctcagaaactgctctgtgatgtgtgcgttcaactctcagagtttaacttttcttttcattcagcagtttggaaacactctgtttgtaaagtctgcacgtggataatttgaccacttagaggccttcgttggaaacgggtttttttcatgtaaggctagacagaagaattctcaggaacttccttgtgttgtgtgtattcaactcacagagttgtacgatcttttacacagagcagacttgaaacactctttttgtggaatttgcaagtggagatttcagccgctttgaagtcaaaggtacaaaaggaaatatcgtcgtaaaaaaactagacagaatcattcccacaaactgcgttgtgatgtgttcgttcaactcacagagtttaacctttctgttcatagagcagttaggaaacactctgtaacgtctgtaagtggatattctgacatcttgtggccttcgttggaaacgggatttcttcatattctgctagaaagaagaattctcagaatcttccttgtgttgtgtgtattcaactcaccgagttgaacgatcctttacacagagcagacttgaaacactctttttgtggaatttgcaagtggagatttcagccgctttgaggtccatgttagaaaaggaaatatcttcgtataaaaactagacagaatgattctcagaaactcctttgtgatgtgtgcgttcaactcacagagtttaacctttcttttcatagagcagttaggaaacactctgtttgtaaagtctgcaagtggatattcagacctctttgaggccttcgttggaaacgggtatttttcatataaggctagacagaagaattctcagtaacttccttgtgttgtgtgtatacaactcacagagttgaactttcatttagagagagcagatttgaaacactgtttttgtggaatttgcaagtggagatttcaagcgctttggggccaaaggcagaaaaggaaatatcttcgtataaaaactagacagaatcattctcagaaactgctctgcgatgtgtgcgttcaactctcagagtttaacttttcttttcattcaacagtttggaaacactctgtttgtaaagtctgcacgtggatattttgaccacttagaggccttcgttggaaacaggtttttttcatgtaaggctagacacaagaattcccagtaacttccttgtgttgtgtacattcaactcacagagttgaacgttcccttagacagagcagatttgaaacactctttttgtgcaattggcaagtggagatttcaagcgctttaaggtcaatggcagaaaaggaaatatcttcgtttctaaactagacagaatgattctcagaaactcctttgtgctgtgtgcgttcaactcacagagtttaacctttcttttcatagagcagttaggaaacactctgtttgtaaagtctgcaagtggatattcagacatctttgaggctttcgttggaaacgggatttcttcatattctgccagacagaagaattctcagaaacttccttgtgttgtgtgtattcaactcacagagttgaacgatcgtttacacagagcagacttgaagcactctttttgtggaatttgcaagtggagatttcagccgctttgaggtcaatggtagaaaaggaaatatcttcgtataaaaactagacagaatgattctcagaaactcctttgtgatgtgtgcgttcagctcacagagtttaacctttctgttcatagagcagttaggaaacactctgtttgtaaagtctgcaagtggatattcagacctccttgaggccttcgttggaaacgggatttcttcatattctgctagacagaagaattctcagtaacttccttgtgttgtgtgtagtcaactcacagagttgaacgatcctttacacagagcagacttgaaacattctttttgtggaatttgcaagtggagatttcagccgctttgaggtcaatggtagaataggaaatatcttcctatagaaactagacagaacgattctcagaaactcctttgtgatgtgtgcgttcaactcacagagtttaacttttcttttcatagagccgttaagaaacactctgtttgtaaagtctgcaagtggatattcagacctctttgaggccttcgttggaaacgggatttcttcctattctgctagacagaagaattctcagtcacttccttgtgttgtgtgtattcaactcacagagttgaacgatcctttacagagagcagacttcaaacactctttttgtggaatttgcaagtggagatttcagccgctttgaggtcaatagtagaaaaggaaatatcttcgtataaaaactagacagaatcattctcagaaactgctgcgtgatgtgtgcgttcaactctcagagtttaacttttcttttcattcagcggtttggaaacactctgtttgtaaagtctgcacgtggatattttgaccacttagaggccttcgttggaaacgggttttttttcatataaggctagacagaagaattcccagtaacttccttgtgttgtgtgcattcaactcacagagttgaacgttcccttagacagaggagatttgaaacactctatttgtgcaatttgcaagtgtagatttcaagcgctttaaagtcaatggcagaaaaggaaatatcttcgtttcaaaactagacagaatcattcccacaaactgcgttgtgatgtgttcgttcaactcacagagtttaacctttctgttcatagagcagttaggaaacactctgtttgtaaagtctgcaagtgaatattcagacctccttgaggccttcgttggaaacgggatttcttcatattctgctagaccgaagaattctcagtaacttccttgtgttgtgtgtattcaactcacagagttgaatgttcctttacacagagcagacttgaaacactctttttgtggaatttgcaagtggagatttcagccgctttgaggtcaatggtagaaaagtaaatatcttcgtatgaagactagacagaatgattctcagaaactcctttgtgatgtgtgcgttcaactcacagagttcaacctttcttttaatagagcagttgggaaacactctgtttgtaaagtctgcaagtggatattcagacttctttgaggccttcgttggaagcgggatttcttcatattctgctagacagaagaattctcagtaacctccttgtgttgtgtgtattcaactcacagtgttgaacgaccctttacacagagcagacttgaaacactctttttgtggaatttgcaagtggagatttcagccgctttgaggtcaatggtagaataggaaatatcttcctatagaaactagacagaatgattctcagaaactcctttgtgatgtgtgcgttcaactcacagagtttaacctttctgttcatagagcagttaggaaacactgtgtttgtaaagtctgcaagtggatattcagacctccttgagtccttcgttggaaacgggatttcttcatattctgctagacagaagaattcccagtaacttccttgtgttgtgtgcattcaactcacagagttgaacgttcccttagacagagcagatttgaaacactctatttgtccaatttgcaagtgtagatttcaagcgctttaaggtcaacggcagaaaaggaaatatcttcgtttcaaaactagacagaatcattcccacaaactgcgttgtgatgtgttcgttcaactcacagagtttaacctttctgttcatagagcagttaggaaacactctgtttttaaagtctgtaagtggatattctgacatcttgtggccatcgttggaaacgggatttcttcatattctgctagacagaagaattctcggtaacttccttgtgttgtgtgtattcaactcacagagttgaacgatcctttacacagagcagacttgaaacactctttttgtggaatttgcaagtggagatttcagccgctttgaggtcaatggtagaaaaggaaatatcttcgtatgaagactagacagaatgattctcagaaactcctttgtgatgtgtgcgttcaactcacagagtttaacttttcttttcatagagcagttagacaacactctgtttgtaaagtctgcaagtgaatattcagacctctttgaggccttcgttggaaacgggatttcttcatataatgctagacagaagaattctcagtaacttccttgtgttgtgtgtattcaactcacagagttgaacgatcctttacacagagcagacttgtaacactctttttgtggaatttgcaagtggagatttcagccgctttgaagtcaaaggtagaaaaggaaatatcttcctataaaaactagtcagaatgattctcagaaactgctttgtgatgtgtgcgttcaactcacagagtttaacctttcttttcatagagcagttaggaaacactctgtttgtaaagtctgcatgtggatattgagacttctttgaggccttcgttggaaacgggtttttttcatgtaaggctagacagaagaattctcagtaacttccttgtgttgtgtgtattcaactcacagagttgaactttcatttagagagagtagatttgaaacactgtttttgtggaatttgcaagtggagatttcaagcgctttggggccaaaggcagaaaaggaaatatcttcgtataaaaactagacagaatcattctcagaaactgctgcgtgatgtgtgcgttcaactctcagagtttaacttttcttttcattcagcggtttggaaacactctgtttgtaaagtctgcacgtggatattttgaccacttagaggccttcgttggaaacgagtttttttcatgtaaggctagacagaagcattcccagtaacttccttgtgttgtgtgcattcaactcacagagatgaacgttcccttagacagagaagatttgaaacactctatttgtgcaatttgcaagtgtagatttcaagcgctttaaggtcaatggcagaaaaggaaatatcttcgtttcaaaactagacagaatgattctcagaaaattctttgtgatgtgtgcgttcaactcacagagtttaacctttcttttcatagagcagttaggaaacactctgtttgtaaactctgcaagtggatattcagacctctttgaggccttcgttggaaacgggatttctacatactatgctagacagaagaattctcagtaacttccgcgtgttgtgtgtattcaactcacagagttgaacgatcctttacacagagcagacttgaaacactctttttgtggaatttgcaagtggagatttcagccgctttgaggtcaatggtagaaaaggaaatatcttcctataaaaactagacagaatgattctcagaaactcctttgtgatgtgtgcgttcaactcacagagttcaacctttcttttcatagagcagttaggaaacactctgtttataatgtctgcaattggatattcagacctctttgaggccttcgttgaaaacgggatttcttcatattctgctagacagaagaattcccagtaacttccttgtgttgtgtgtgttcaactcacagagttgaactttcatttacacagagcagatttgaaacactctttttgtggaatttgcaaatggagatttcaagcgctttgaggccaaacgcagaaatggaaatatcttcgtataaaaattagacagaatcattctcagaaactgctctgcgatgtgtgcgttcaactctcagagtttaacttttcttttcattcagcagtttggaaacactctgtttgtaaagtctgcacatggataatttgaccacttagaggccttcgttggaaacgggtttttttcatgtaaggctagacagaagaattcccagtaacttccttgtgttgtgtgcattcaactcatagagttgaacgttccttagagagagcagatttgaaacactctatttgtgcaatttgcaagtgtagatttcaagcgctttaaggtcaatggcagaaaaggaaatatcttcgtttcaaaactagacagaatgattctcagaaacttctttgtgatgtgtgcattcaactcacagagtttaacctttcttttcatagagcagttaggaaacactctgtttgtaaactctgcaagtggatattcagacctctttgaggccttcgttggaaacgggtttttttcatataaggctagacagaagaattcccagtaacttccttgtgttgtgtgtattcaactcacagagttgaacgatcctttacacagagcagacttgtaacactctttttgtggaatttgcaagtggagatttcagccgctttgaagtcaaaggtagaaaaggaaatatcttcctataaaaactagacagaatgattctcggaaactcctttgtgatgtgtgcgttcaactcacagagtttaacctttcttttcatagagcagttaggaaacactctgtttgtaaagtctgcaagtggatattcagacctctttgaggccttcgttggaaacgggatttcttcatattctgctagacagaagaattcccagtaacttccttgtgttgtgtgtgttcaactcacagagttgaactttcatttacacagagcaggtttgaaacactctttttgtggtatttgcaaatggagatttcaagcgctttgtggcgaaatgcagaaaaggaaatatcttcgtataaaaactagacagaatcattctcagaaactgctctgcgatgtgtgcgttcaactctcagagtttaacttttcttttcgttcagcagtttggaaacactctgtttgtaacgtctgcacgtgaataatttgaccacttagaggccttcgttggaaacgggtttttttcatgtaaggctagacagaagaattcccagtaacttccttgtgttgtgtacattcaactcacagagttgaacgttcccttagacagagcagatttgaaacactctttttgtgcaattggcaagtggagatttcaagcgctttgaggtcaatggcagaaaaggaaatatcttcgtttcaaaactagacagaatgattctcagaaactcctttgtgatgtgtgcgttcaactcacagagtttaacctttcttttcatagagcagttaggaaacactctgtttgtaaagtctgcaagtggatattcagacctccttgaggccttcgttggaagcgggatttcttcatattatgctagacagaataattctcagtaacttccttgtgttgtgtgtattcaactcacagagttgaacgatcatttacacagagcagacttgaaacactctttttgtggaatttgcaagtggagatttcagccgcttgaggtcaatggtagaaaaggaaactatcttcgtataaagactagacagaatgattttcagaaactcctttgtgatgtgtgcgttcaactcacagagtttaacctttcttttcatagagcagttaggaaacactctgtttgtaaagtctgcaagtggatattcagacctccttgaggccttctttggaaacgggatttcttcatattctgatagacagaagaattctcagtaacttccttttgtggtgtgtattcaactcacagagttgaatgatcctttacacagaacagtcttgaaacactctttttgtggaatttgcaagtggagatttcagccgctttgaggtcaatggtagaataggaaatatcttcctatagaaactagacagaattattctcagaaactcctttttgatatgggtgttcaactcaccgagtttaacctttcctttcatagagcagttaggaaacactctgtttgtaaagtctgcaagtggatatttccacctctttgaggccttcgttggaaacgggttttttttcatgtaattctagacagaagaattctcagtaacttccttgtgttgtgtgtattcaactgacagagttgaactttcatttagagagagcagatttgtaacactgtttttgtggaatttgcaagtggagatttcaagagctttggggccaaaggcagaaaaggaaatatcttcgtataaaaactagacagaatcattctcagaaactgcggcgtgatgtgtgcgttcaactctcagagtttaacttttcttttcattcagcggtttggaaacactctgtttgtaaagtctgcacgtggatattttgaccacttagaggccttcgttggaaacgggtttttctcatgtaaggctagacagaagaattcccagtaacttccttgtgttgtgtgcattcaactcacagagttgaacgttcccttagacagagcagatttgaaacactctatttgtgcaatttgcaagtgtagatttcaagcgctttatggtcaacggcagaaaaggaaatatcttcgtttcaaaactagacagaatgattctcagaaactgctttgtgatgtgtgcgttcaactcacagagttcaacctttcttttcatagagcagttgggaaacactctgtttgtaaagtctgcaagtggatattcagacatccttgaggctttcgttggaaacgggatttcttcatattctgccagaaagaagaattctcagaaacttcctggtgttgcgtgttttcaactcacagagttcaacgatcctttacacagagtagacttgaaaaactctttttgttgaattggccagtggagatttcagccgctttgaggtcaatggtagaaaaggaaatatcttcgtataaaaactagactgaatgattctcagaaactcctttgtgatgtgtgcgttcaactcgcagagtttaacctttcttttcatagagcagttaggaaacactctggttgtaaagtctgcaagtggatattcagacctcgttgaggccttcgttggaaacgggatttcttcatattatgctagacagaagaattcccagtaacttccttgtgttgtgtgtgttcaactcacagagttgaactttcatttacacagagcagatttgaaacactctttttgtggaatttgcaagtggagatttcaagcgctttgaggccaaaggcagaaaaggaaatatcttcgtttcaaaactacacagaatcattctcagaaactgctgcgtgatgtgtgcgatcaacactcagagtttaacttttcttttcattcagcggtttggaaacactctgtttgtgaagtctgcacgtggaaattttgacaacttagagaccttcgttggaaacgggattttttcatgtaaggctagacagaagaattcccagtaacttccttgtgttgtgtgcattcaactcacagagttgaacgttcccttagaccgagcagatttgaaacactctatttgtgcaatttgcaagtgtagttttcaagctctttaaggtcaacggcagaaaaggaaatatcttcgtttcaaaactatacagaatcattcccacaaactgcgttgtgatgtgttcgttcaactcacagagtttaacctttctgttcatagagcagttaggaaacactctgtgtgtaaagtctgcaagtggatattcagacctctttgaggccttcgttggaaacggtatttcttcatattatgctagacagaataattctcagtaacttccttgtgttgtgtgtattcaactcacagagttgaaggatcctttgcagagagcaggcttgaaacactctttttgtcgaatttgcaagtggagatttcagccgctttgaggtcaatggtagaataggaaatatcttcttatagaaactagacagaatgattctcagaaactcctttgtgatgtgtgagtacaactcacagagtttaacctttcttttcatagagcagttaggaaacactctgtttgtaaagtctgcaagtggatattcagacctctttgaggccttcgttggaaacgggtttttttcatgtaaggctagacagaagaattctcagtaacttccttgtgttgtgtgtattcaactgacagagttgaactttcatttagagagagcagatttgaaacactgtttttgtggaatttgcaagtggatatttcaagcgctttggggccaaaggcagaaaaggaaatatcttcgtataaaaactagacagaatcattctcagaaactgctctgtgatgtgtgcgttcaactctcagagtttaacttttcttttcattcagcagtttggaaacactctgtttgtaaagtctgcacgtggataatttgaccacttagaggccttcgttggaaacgggtttttttcatgtaaggctagacagaagaattcccagtaacttccttgtgttgtgtgcattcaactcacagagttgaacgttcccttagacagagcagatttgaaacactctatttgtgcaatttgcaagtgtagatttcaagcgcattaaggtcaatggcagaaaaggaaatatcttcgtttcaaaattagacagaaatcattcccacaaactgcgttgtgatgtgttcgttcaactcacagaagtttaacctttcttttcatagagcagttaggaaacagtctgtttgtaaattctgtaagtggatattctgacatcttgtggccttcgttggaaacgggatttcttcatattctgctagacagaacaattctcagtaacttccttttgttgtgtgctttcaactcacagagttgaacgatcctttacacagagcagattagaaacactctttttgtggaatttgcatgtggagatttcagccgctttgaggtcaatggtagaaaaggaaatatcttcgtataaaaactagacagaatgattctcagaaactcctttgtgatgtgtgtgttcaactcacagagtttaacctttcttttcatagagtagttaggaaacactctgtttgtaaagtctgcaattggatattcagacctcttagaggccttcgttggaaacgggatttcttcatattatgctagacagaagaattctcagtaacttccttgtgttgtgtgcattcatctcacagagttgaaagatcctttacacagagcagattagaaacaatatttttgtggattttgcaagtggagatttcagccactttgaggtcaatggtagaaaaggaaatatcttcgtataaaaactagagagaatcattctcagaaactgctctgcgatgtgtgcgttcaactctcagagtttaacttttcttttcattcagcagtttggaaacactctgtttgtaaagtctgcacgtggataacttgaccacttagaggccttcgttggaaacgggtttttttcctgtaaggctagacagaagaattcccagtaacttccttgtgttgtgtgcattcaactcacagagttgaacgttcccttagacagagcagatttgaaacactctatttgtccaatttgcaagtgtagatttcaagcgctttaaggtcaacggcagaaaaggaaatatcttcgtttcaaaactagacagaatcattcccacaaacttcgttgtgatgtgttcgttcaactcacagagtttaacgtttattttcatagagcagttaggaaacactctgtttgtaaactcttcaagtggatattcagacctctttgaggccttcgttggaaacgggatttcttcatattctgctagacagaagaattctcagtaacttccttgtgttgtgtgtattcaactcacagagttgaacgatcctttacacagagcacacttgaaacactctttttgtggaatttgcaagtggagatttcagccgctttgaggtcaatgggagaaaaggaaatatcttcgtataaagactagacagaatgattctcagaaactcctttgtgatgtgtgtgttcaactcacagagtttaacctttcttttcatagagcagttaggaaacactctgtaaagtctgaaagtggatattcagacctctttgaggccttcgttggaaacgggatttcttcatattctgctagacagaataattctcagtaacttccttgtgttgtgtgtattcaactgacagagttgaactttcatttagagagagcagatttgaaacactgtttgtgtggaatttgcaagtggagatttcaagcgctttggggccaaaggcagaaaaggtaatatcttcgtataaaaactagacagaatcattctcagaaactgctgcgtgatgtgtgcgttcaactctcagagtttaacttttcttttcattcagccgtttggaaacactctgtttgtaacgtctgcacgtggatattttgaccacttagaggccttcgttggaaacgggttttttgcatgtaaggctaaacagaagaattccccagtaacttccttgtgttgtgtgcattcaactcacagagttgaacgttcccttagacagagcagatttgaaacactctatttgtgcaatttgcaagtgtagatttcaagcgctttaaggtcaacggcagaaaaggaaatatcttcgtttcaaaactagacagaatcattcccacaaactgcgttgtgatgtgttcgttcaactcacagagtttaacctttcttttcatagagcagttaggaaacagtctgtttgtcaattctgtaagtggatattctgacatcttgtggccttcgttggaaacgggatttcttcatattctgctagacagaagaattctcagtaacttccttgtgttgtgtgtattcaactcacagagttgaacgatcctttacacagagcagacttgaaacactcttcttgtggaatttgcaagtggagatttcagtccgctttgaggtcaattgtagaataggaaatatcttcctatagaaactagacagaatgattctcagaaactcctttgtgatgtgtgcgttcaactcacagagtttaacctttcttttcatagagcagttaggaaacactctgtttgtaaagtctgcaagtggatattcagacctccttgaggccttcgttggaaacgggttttcttcatattatgctagacagaagaattctcagtaacttccttgtgttgtgtgtattcaactcacagagttgaacgatcctttacacagagcagacttgagacactctttttgtggaatttgcaagtggagatttcagccgctttgaggtcaatggtagaataggaaatatcttcctatagaaactagacagaatgattctcagaaactcctttgtgatgtgtgcgttcaactcacagagtttaacctttcttttcatagagcagttgggaaacactctgtttgtaaagtctgcaagtggatattcagacgtctttgaggccttcgttggaaacgggatttcttcatattctgctagacagaagaattcccagtaacttccttgtgttgtgtgcattcaacatcacagagttgaacgttcccttagacagagcagatttgaaacactatatttgtgcaatttgcaagtgtagatttcaagcgctttaaggtcaatggcgagaaaaggaaatatcttcgtttcaaaactagacagaatgattctcagaaactcctttgtgatgtgtgagttcaactcacagagtttaaccgttcttttcatagagcagttaggaaacactctgtttgtaaagtctgcaagtggatattcagacctctttgaggccttcgttggaaacgggatttcttcatattctgctagacagaagaattctcagtaacttccttgtgttgtgtgcattcaactcacagagttgaacgatcctttacacagggcagatttgaaacactctttttgtggaatttgcaagcggagatttcagcctctttgaggttaatggtagaaaatgaaatatcttcgtatagaaactagacagaatgattctcagaaactcctttgtgatgtgtgtgttcaactcacagagtttaacctttcttttcatagagcagtttggaaacactctgtttgtaaagtctgcaagtggatattcagacctctttgaggccttcgttggaaacgggtttttttcatataaggctagacagaagaattcccagtaacttccttgtgtgtgttcaactcacagagttgaactttcatttacacagagcagattggaaacactctttttgtggaatttgcaaagggagatttcaagagctttgaggccaaaggcagaaaaggaaatatcttcgtataaaaacgagacagaatcattctcagaaactgctgtgcgatgtgtgcgttcaactctcagagtttaacttttcttttcattcagcagtttggaaacactctgtttgtaaagtctgcacgtggataatttgaccacttagaggccttcgttggaaacgggtttttttcatgtaaggctagacagaagaattctcagtaacttccttgtgttgtgtgtattcaactcacagagttgaacgatcctttacacagagcagacttgaaacactctttttgtggaatttggaagtggagatttcagccgctttgagtgtcaatggtagaataggaaatatcttcctatagaaactagacagaatgattctcagaaactcctttgtgatgtgtgcgttcaactcacagagtttaacctttcttttcatagagcagttgggaaacactctgtttgtaaagtctgcatgtggatattcagacatccttgaggctttcgttggaaacgggatttcttcatattctgctagaaagaataattctcagtaacttccttgtgttgtgtgtattcaactcacagagttgaacgatcctttacagagagcagacttgaaacactctttttgtggaatttgcaagtggagatttcagccgctttgaggtcaaaggtagaataggaaatatcttcctacagaaactagacagaacgattctcagaaactcctttgtgatgtgtgcgttcaactcacagagtttaacctttcttttcatagagcagttaggaaacactctgtttgtaaagtctgcaagtggatattcagacctctttgaggtcttctttggaaacgggatttcttcctattctgctagacagaagaattcccagtaacttccttgtgttgtgtgtgttcaactcacagagttgaactttcatttacacagagcagatttgaaacactctttttgtggaatttgcaagtggagatttcaagcgctttgaggccaaggcacaaaaggatatatcttcgtataaaaactagacagaatcattctcagaaactgctctgcgatgtgtgcgttcaactctcagcagtttaacttttcttttcattcagcagtgtggaaacactctgtttgtaaagtctgcacgtggatattttgaccacttagaggccttcgttggaaacgggtttttttcctgtaaggctagacagaagaattcccagtaacttcccttgtgttgtgtacattcaactcacagagttgaacgttcccttagacagagctgatttgaaacactctttttgtgcaattggcaagtggagatttctagcgctttaaggtcaatggcagaaaaggaaatatcttcgtttcaaaactagacagaatcattcccacaaactgcgttgtgatgtgttcgttcaactcacaagagtttaacctttcttttcatagagcagttaggaaacagtctgtttgtcaattctgtaagtggatattctgacatcttgtggccttcgttggaaacgggatttcttcatattctgctagacagaagaattctcagaaacttccttgtgttgtgtgtattcaactcacagagtagaacgatcctttacacagagcagacttgaaacactctttttgtggaatttgcaagtggagatttcagccgatttgaagtcaatggtagaaagggaaatatcttcgtatagaaactagacagaatgattctcagaaaatcttttgtgtgtgtgcgttcaactcacagagtttaacttttcttctcatagagcagttaggaaacactctgtttgtaaagtgtgcaagtggatattcagacctctttgaggccttcgttggaaacgggatttcttcatattatgctagacagaagaattcccagtaacttccttgtgttgtgtgtgttcaactcacagagttgaacttccatttacacagagcagatttgaaacactctttttgtggaatttgcaagtggagatttcaagcgctttgaggccaaaggcagaaaaggaaatatcttcctttcaaaactagacagaatcattctcagaaactgctctgcgatgtgtgcgttcaactctcagagtttaacttttcttttcattcagcagtttggaaacactctgtttgtaaagtcagcacgtggataatttgaccacttagaggccttcgttggaaacgggtttttttcatgtaaggctagacagaagaattcccagtaacttccttgtgttgtgtgcattcaactcacagagttgaacgtttccttagacagagcagaattgaaacactctatttgtgcaatttgcaagtgtagatttcaagcgctttatggtcagtggcagaaaaggaaatatcttcgtttcaaaactagacagaatgattctcagaaactcctttgtgatgtgtgcgttcaactcacagagtttaacctttcttttcatagagcagttaggaaacactctgtttgtaaagactgcaagtggatattcagacctctttgaggccttcgttggaaacgggatttcttcatattctgctagacagaagaattctcagtaacttccttgtgttgtgtgtattcaactcacagagttgaacgatcctttacacagagcagacttgaaacattctttttgtggaatttgcaagtggagatttcagccgctttgacgtcaatggtagaataggaaatatcttcctatagaaactggacagaatgattctcagaaactcctttgtgatgtgtgggttcaactcacagagtttaacctttcttttcatagagcagttaggaaacactctgtttgtaaggtctgcaagtggatattcagacctctttgaggccttcgttggaaacgggattttttcatataaggctagacagagaattctcagtaacttccttgtgttgtgtgtattcaactgacagagttgaactttcatttagagagagcagatttgaaacactgtttttgtggaatttgcaagtggagatttcaagcgctttggggccaaaggcagaaaaggaaatatcttcgtataaaaactagacagaatctttctcagaaactgctctgcgatgtgtgcgttcaactctcagagtttaacttttcttttcattcagcagtttggaaacactctgtttgtaaagtctgcacgtggatattttgaccacttagaggccttcgtttgaaacgggtttttttcctgtaaggctagacagaagaattcccagtaacttccttgtgttgtgtacattcaactcacagagttgaacgttcccttagacagagcagatttgaaacactctttttgtgcaattggcaaatggagatttcaagcgctttaaggtcaatggcagaaaaggaaatattcttcgtttcaaaactagacagaatcattcccacaaactgcgttgtgatgtgttcgttcaacccacagagtttaacctttctgttcatagagcagttaggaaacactctgtttgtaaagtatgaaagtggatattctgacatcttgtggccttcgttggaaacgggatttcttcatattctgctagacagaagaattctcagtaacttccttgtgttgtgtgtattcaactcacagagttgaacgatcctttacacagagcagacttgaaacactctttttgtggaatttgcttgtggagatttcagccgctttgaggtcaatggtagaaaaggaaatatcttcgtataaagagtagacagaatgattctcataaactccttcgtgatgtgtgcgttcaactcacagagtttaacctttcttttcatagagcagttaggaaacactctgtttgtaaagtctgcaagtggatattcagacctctttgaggccttcgttttaaacgggatttcttcatattatgctagacagaagaattcccagtaacttccttgtgttgtgtgtgttcaactaatagagttgaactttcatttacacagagcagattggaaacactctttttgtggaatttgcaagtggagatttcaagcgctttgaggccaaaggcagaaaaggaaatatcttcttataaaaactagacagaatcattctcagaaactgctgcgtgatgtgtgcgttcaactctcagagtttaacttttcttttcattcagcggtttggaaacactctgtttttaaagtctgcacgtggaaattttgaccacttagaggccttcgttggaaacgggattttttcatgtaaggctagacagaagaattcccagtaactaccttgtgttgtgtacattcaactcacagagttgaacgttcccttagacagagcagatttgaagtactctttttgtgcaattggcaaatggagatttcaagcgctttaaggtcaatggcagaaaaggaaatatcttcgtttcaaaactagacagaatcattcccacaagctgcgttgtgatgtgttcgttcaactcacagagtttaacctttctgttcatagagcagttaggaaaccctctgtttgtaaagtctgcaagtggatattcagacctctttgaggctttcgttggaaacgggatttcctcaaattctgctagacagaagaattctcagtaacttccttgtgttgtgtgtattcaactcacagagttgaatgatcctttacacagagcagacttgaaacactctttttgtggaatttgcaagtggagatttcagccgctttgaggtcaatggtagaaaaggaaactgtcttcatataaagaatagacagaatgattctcagaaaatcttttgtgatgtgtgcgttcaacccacagagtttaacctttcttttcatagagcagttaggaaacactctgtttgaaaagtctgcaagtggatattcagacctctttgaggccttcgttggaaacgggatttcttcatattatgctagacagaagaattcccagtaactttccttgtgttgtgtgtgttcaactcacagagttgaactttcatttacacagagcagatttgaaacactctttttgtggaatttgcaagtggagatttcaagcgctgtgaggccaaaggcagaaaaggaaatatcttcgtataaaaactagacagaatcattctcagaaactgctctgcgatgtgtgcgttgaactctcagaagtttaacttttcttttcattcagcagtttggaaacactctgtttgtaaagtctgcacgtggataatttgaccacttagaggccttcgttggaaacgggtttttttcatgtaaggctagacagaagaattcccagtaacttccttgtgttgtgtgcattcaactcacagagttgaacgttcccttagacagagcagatttgaaacactctatttgtgcaatttgcaagtgtagatttcaagcgcattaaggtcaatggcagaaaaggaaatatcttcgtttcaaaattagacagaatcactcccacaaactgcgttgtgatgtgttcgttcaactcacagagtttaacctttcttttcatagagcagttaggaaacagtctgtttgaaaattctgtaagtggatattctgacatcttgtggccttcgttggaaacgggatttcttcatattctgctaggcagaataattctcagtaacttccttgtgttgtgtgtattcaactcacagagttgaaggatcctttacagagagcaggcttgaaacactctttttgtcgaatttgcaagtggagatttcagccgctttgaggtcaatggtagaaaagtaaatatcttcgtataaagactagacagaatgattctcagaaactcctttgtgatgtgtgcgttcaactcacagagttcaacctttcttttcatagagcagttgggaaacactctgtttgtaaagtctgcaagtggatattcagacttctttgagggcttcgttggaagcgggatttcttcatattctgctagacagaagaattcccagtaacttccatgtgttgtgtgtgttcaactcacagagttgaactttcatttacacagagcagatttgaaacactctttttgtggaatttgcaaatggagatttcaagcgctttgaggccaaaggcagaaaaggaaatatccttcgtataaaaactagacagaatcattctcagaaactgctctgcgatgtgtgcgttcaactctcagagtttaacttttcttttcattcagcagtttggaaacactctgtttgtaaactctgcacgtggataatttgaccacttagaggtcttcgttggaaacgggtttttttcatgtaacgctagacagaagaattcccagtaacttccttgtgttgtgtgcattcaactcacacagttgaacgttcccttagacagagcagatttgaaacactctatttgtgcaatttgcaagtgtagatttcaagcgctttaaggtcaatggcagaaaaggaaatatcttcgtttcaaaactagacagaatcattcccacaaactgcgttgtgatgtgttcgttcaactcacagagtttaacctttctgttcatagagcagttaggaaacactctgtttgtaaagtctgtaagtggatattctgatatcttgtggccttcgttggaaacgggatttcttcctattctgctagacagaagaattctcagtaacttccttgtgttgtgtgtattcaactcacagagttgaacgatcctttacacagagaagagttgaaacactctttttgtggaattggcaaggggagatttctgccgctttgagtcaatggtagaaaaggaaatatcttcgtataaagactagacagaatgattctcaggaactcctttgtgatgtgtgcgttcaactcacagagtttaacttttcttttcatagagcagttaggaaacactctgtttgtaaagtcttcaagtggatattcagacctctttgaggccttcgttggaaacgggatttcttcatattctgctagacagaagaattccaagtaacttccttgtgttgtgtgtgttcaactcacagagatgaactttcatttacacagagcagatttgaaacactctttttgtggaatttgcaagtggagatttcaagcgctttgaggccaaaggcagaaaaggaaatatcttcgtataaaaactagacagaaatcattctcagaacctgcttcgtgatgtgtgcgttcaactctcagagtttaacttttcttttcattcagcggtttggaaacactctgtttgtaaagtctgcacgtggaaattttgaccacttagaggccttcgttggaaacgggtttttttcatgtaaggctagacagaagaattcccagtaacttctttgtgttgtgtgcattcaactcacagagttgaacgttctcttagacagagcagatttgaaacactctatttgtgcaatttgcaagcgtagatttcaagcgctttaaggtcaatggcagaaaaggaaatatcttcgtttcaaaactagacagaaatgattcccacaaactgcgttgtgatgtgttcgttcaactcacagagtttaacctttctgttcatagagcagttaggaaacactctgtttgtaaagtctgtaagtggatattctgacatcttgtggccttcgttggaaacgggatttcttcatattatgctagacagaagaattctcagtaacttccttgtgttgtgtgtattcaactcacagagttgaacgatcctttacacagagcagtcttgaaacactctttttgtggaatttgcaagtggagatttcggccgctttgaggtcaacggtagaaaaggaaatatcttcgtataaagactagatagaatgattctcagaaactcctttgtgatgtgtgcgttcaactcacagagtttaacctttcttttcatagcgcagttgggaaacactctgtttgtaaagtctgcaagtggatattctgacatccttgaggctttcgttggaaacgggatttcttcatattctgctagaaagaagaattctcagtaacttccttgtgttgtgtgtattcaactgacagagttgaactttcatttagagtgagcagatttgaaacactgtttttgtggaatttgcaagtggagatttcaagcgctttggggccaaaggcagaaaaggaaatatcttcgtatataaactagacagaatcattctcagaaactgctctgcgatgtgtgcgttcaactctcagagtttaacttttcttttcattcagcagtttggaaacactctgtttgtaaagtctgcacgtggataacttgacctcttagaggccttcgttggaaacgggtttttttcctgtaaggctagacagaagaattcccagtaacttccttgtgttgtgtgcactcaactcacagagttgaacgttcccttagacagagcagatttgaaacactctatttgtgcaatttgcaagcgtagatttcaagcgctttaaggtcaatggcagaaaaggaaatatcttcgtttcaaaactagacagaatcattcccacaaactgcgttgtgatgtgttcgttcaactcacagagtttaacctttcttttcatagagcagttaggaaacattctgtttgtaaattctgtaagtggatattctgacatcttgtggccttcgttggaaacgggatttcttcatattctgctagacagaagaattctcagtaacttccttgtgttgtgtgttttcaactcagagagttgaacgatcctttacacagagcagacttgaaacactctttttgtggaatttgcaactggagatttcagccgcgttgatgtcaatggtagaaaaggaaatatcttcgtataaaaactggacagaatgattctcagaaactcctttgtgatgtgtgcgttcaactcacacagtttaacctttcttttcatagagaagttaggaaacactctgtttgtaaagtctgcaagtggatgttcagacctctttgaggccttcgttggaaacgggtttttttcatataaggctagacagaagaattcccagtaacttccttgtgttgtgtgtgttcaactcacagagttgaactttcatttacccagagcagatttgaaacactctttttgtggaatttgcaaatggagatttcagccgcgttgaggtcaatggtagaaaaggaaatatcttcgtttcaaaactagacagaatcattctcaggaactactgcgtgatgtgtgggttcaactctcagagtttaacttttcttttcattcagcggtttggaaacactctctttgtaaagtctgcacgtggaaattttgaccacttagaggccttcgtttgtttttttcatgtaaggctagacagaagaattcccagtaacttccttgtgttgtgtgtattcaactcacagagttgaacgatcctttacacagagcggacttgtaacactctttttgtggaatttgcaagtggagatttcagccgctttgaagtcaaagttagaaaaggaaataacttcctataaaaactagacagattcattcccacaaactgcgttgtgatgtgttcgttcaactcacagagtttaacctttcttttcatagagcagttaggaaacagtccgtttgaaaattctgtaagtggatattctgacatcttgtggccttcgttggaaacgagatttcttcatattctgctagacagaagaattctcagtaacttccttgtgttgtgtgtattgaactcacagagttgaacgatcctttacacagagcagacttgaaacactctatttgtagaatttgcaagtggagatttcagccgctttgaggtcagtagtagaaaaggaaatatcttcgtggaaaaactagacagaatgattctcagaaactcctttgtgatgtgtgcgttcaacacacagagtttaacttttcttttcatagagcagttagtaaacactctgtttataaagtctgcaagtggatattcagacccctttgaggccttcgttggaaacgggatttcttcatattatgctagacagaagaattctcagaatcttccttgtgttgtgtgtattcaactcacagagttgaacgatcctttacacagagcagacttgaaacactctttttgtggaatttgcaagtggagatttcaagcgctttgaggccaaaggcagaaaaggaaatatcttcgtagaaaaactagacagaatcattctcagaaactgctctgcgatgtgtgcgttcaactctcagagtttaacttttcttttcattcagcagtttggaaacactctgtttgtaaagtctgcacgtggataatttgaccacttagaggtcttcgttggaaacgggttttttcatgtaaggctagacagaagaattcccagtaacttcccttgtgttgtgtacattcaactcacagagttgaacgttcccttagacagagcatatttgaaacactctttttgtgcaattggcaagtggagatttcaagcgctttaaggtcaatgggagaaaaggaaatatcttcgtttcaaaactagacagaatcttcccacaaactgcgttgtgatgtgttcgttcaactcacagagtttaacctttcttttcatagagcagttaggaaacagtctgtttgtcaattctgtaagtggatattctgacatcttgtggccttcgttggaaacgggatttcttcatattctcctagacagaagaattctcagtaacttccttgtgttgtgtgtattcaactcacagagttgaacgatcctttacacagagcagacttgaaacactctttttgtggaatttgcaagtggagatttcagccgctttgaggtcaatggtagaaaaggagacatcttcgtataaaaactagacagaatgattcttagaaactcctttgtgatgtgtgcgttcaactcacagagtttaccctttcttttcatagagcagttaggaaacactctgtttgtaaagtctgcaagtggatattcagacatccttgaggctttcgttggaaacgggatttcttcatattctgccagaaagaagaattcccagtaacttccttgtgttgtgtgtgttcaactcacagagttgaactttcatttacacagagcagatttgaaacactctttttgtggaatttgcaagtggagatttcaagcgctttgaggtcaatggtagaaaaggaaatatcttcgtataaaaactagacagaatcattctcagaaactgctctgcgatgtgttcgttcaactctaagagtttaacttttcttttcattcagcagtttggaaacactctgtttgtaaagtctgtacgtggataatttgaccacttagaggccttcgttggaaacgggtttttttcatgtaaggatagacagaagatttctcagtaacttccttgtgttgtgtgtattcaactcacagagttgaacgatcctttacacagagcagacttgtatcactctttttgtggaatttgcaagtggagatttcagccgctttgaagtcaaaggtagaaaaggaaatatcttcctataaaaactagacagaatgattctcagaaacttctttgtgatgtgtgcgttcaactcacagagtttaacctttcttttcatagagcagttaggaaacactgtgtttttaaactctgcaagtggatattcagacctctttgaggccttcgttggaaacgggatttcttcttactgtgctagacagaagaattctcagtaacttccttgtgttgtgtgtattcaactcacagagttgaccgatcctttacacagagcagacttgtaacactctttttgtggaatttgcaagtggagatttcagccgctttgaagtcaaaggtagaaaagggaatatcttcctataaaaactagacagaatgattctcagaaactcctttgtgatgtgtgcgttcaactcacagagtttaacctttcttttcatagagcagttaggaaacactctgtttgtaaagtctgcaagtggatattcagacctctctgaggccttcgttggaaacgggatttcttcatactgtgctagacagaagaattcccagtaacttccttgtgttgtgtgtgttcaactcacagagttgaactttcatttacccagagcagatttgaaacactctttttgtggaatttgcaagtggagatttcaagcgttttgaggccaaaggcagaaaaggaaatgtcttcgtttcaaaactagacagaatcattctcagaaactgctctgcgatgtgtgcgttcaactctcagagtttaacttttcttttcattcagcagtttggaaacactctgtttgtaaagtctgcacgtggatattttgaccatttagaggccttcgttggaaacgggtttttttcttgtaaggctagacagaagaattctcagtaactcccttgtgttgtgtgtattcaactcacagagttgaacgatcctttacagagagcagacttgaaacactctttttgtggaatttgcaagtggagatttcagccgctttgaggtcaatggtagaataggaaatatcttcctatagaaactagacagaatgattctcagaaattcctttgtgatgtgtgcgttcaactcacagagtttaacctttcttttcactagagcagttaggaaacactctgtttgtaaagtctgcaagtggatattcagacctctttgaggccttcgttggaaacgggatttcttcatattctgctagacagaagaattctcagtaacttccttgtgttgtgtgtattcaactcacagagttgaacgatcctttacacagagcagacttgaaacactctttttgtggaatttgcaagtggagatttcagccgctttgaggtcaatagtagaaaaggaaatatcttcgtagaaaaactaggcagaatgattctcagaaactcctttgtgatgtgtgcgttcaagtcacagagtttaacctttcttttcatcgagcagttaggaaacactctgtttgtaaagtctgcaagtggatattcagacatccttgaggctttcgttggaaacgggatttcttcatattctgctagaaagaagaattcccagtaacttccttgtgttgtgtgtgttcaactgacagagttgaactttcatttacccagagcagatttgaaacactctttttgtggaatttgcaagtggagatttcaagcgctttgaggccaaaggcagaaaaggaaatatcttcgtttcaaaactagacagaatcattctcagaaactgctgcgtgatgtgtgcgtccaacactcagagtttaacttttcttttcattcagcggtttggaaacactctgtttgtaaagtctgcacgtggatattttgaccacttagaggccttcgttggaaacgggtttttttcatgtaaggctagacagaaggaattcccagtaacttccttgtgttgtgtacattcaactcacagatttgaacgttcccttagacagagcagatttgaaacactctttttgtgcaattggcaaatggagatttcaagcgctttaaggtcaatggcagaaaaggaaatatcttcgtttcaaaactagacagaatcattcccacaaactgcgttgtgatgtgttcgttcaactcacagagtttaacctttctgttaatagagcagttaggaaacactctgtttgtaaagtttgcaagtggatattcagacctccttgaggccttcgttggaaacgggatttcttcatattctgctagacagaagaattctcagaatcttccttgtgttgtgtgtattcaactcacagagttgaacgatcctttacacagagcagacttgaaacactctttttgtggaatttgcaagtggagatttcagccgctttgaggtccatggtagaaaaggaaatgtcttcgtataaaaactagacagaatgattctcagaaacttctttgtgatgtgtgcgttcaactcacagagtttaacctttcttttcatagagcagttaggaaacactctgtttgtaaattctgcaagtggatattcagacctctttgaggccttcgttggaaacgggatttcttcatactatgctagacagaagaattcccagtaacttccttgtgttgtgtgtgttcaactcacagatttgaactttcatttacacagagcagatttgaaacactctttttgtggaatttgcaagtggagatttcaagcgctttgaggccaaaggcagaaaaggaaatatcttcgtataaaaactagacagaatcattctcagaaactgctgcgtgatgtgtgcgttcaactctcagcgtttaacttttcttttcattcagcggtttggaaacactctgtttgtaaagtctgcacgtggatattttgaccacttagaggccttcgttggaaacgggtttttttcatgtaaggctagacagaagaattcccagtaacttccttgtgttgtgtgcattcaactcacagagttgaacgttcccttagacagagcagatttgaaacactctatttgtgcaatttgcaagtgtagttttcaagctctttaaggtcaacggcagaaaaggaaatatcttggtttcaaaactagacagaatgattctcagagaatcttttgtgatgtgtgcgttcaactcacagagtttaacttttcttctcatagagcagttaggaaacactctgtttgtaaagtctgcaagtggatattcagacctctttgaggtcttcgttggaaacgggatttcttcatattatgctagacagaataattctcagtaacttccttgtgttgtgtgtattcaactcacagagttgaaggatcctttacagagagcaggcttgaaacactctttttgtcgaatttgcaagtggagatttcagccgctttgaggtcaaaggtagaataggaaatatcttcttatagaaactagacacaatgattctcagaaacttctttgtgatgtgtgcgttcaactcacagagtttaacctttcttttcatagagcagttaggaaacactctgttggtaaactctgcaagtggatattcagacctctttgaggccttcgttggaaacgggatttcttcatactatgctagacagaagaattcccagtaacttccttgtgttgtgtgtgttcaactcacagagttgaactttcatttacacagggcagatttgaaacactctttttgtggaatttgcaaatggaggtttcaagcgctttgaggccaaaggcagaaaaggaaatatcttcgtataaaaactagacagaatcattctcagaaactgctctgcgatgtgtgcgttcaactctcagagtttaacttttcttttcattcagcagtttggaaacactctgtttgtaaagtctgcacgtggataatttgaccacttagaggccttctttggaaacgggtttttttcatataaggctagacagaagaattcccagtaacttccttttgttgtgtgtgttcaagtcacacagatgaactctcatttacacagagcagatttgaaactctctttttgtggaatttgcaaatggagatttcaagcgctttgaggccaaaggcagaaaaggaaatatcttcctataaaaactagacagaatcattctcagaaactgctctgcgatgtgtgcgttcaactctcagagtttaacttttcttttcattcagcagtttggaaacactctgtttgtaaagtctgcacgtggataacttgaccacttagaggccttcgttggaaacgggtttttttaacgtaaggctagacagaagaatttcccagtaacttccttgtgttgtgtgcattcaactcacagagttgaacgttcccttagacagagcagatttgaaacactctatttgtgcaatttgcaagtgtagatttcaagcgctttaaggtcaatggcagaaaaggaaatatcttcgtttcaaaactagacagaatcattcccacaagctgcgttgtgatgtgttcgttcaactcacagagtttaacctttctgttcatagagcagttaggaaacacgctgtttgtaaagtctgtaagtggatattctgacatcttgtggccttcgttgcaaacgggatttcttcatattctgctagacagaagaattctcagtaactaccttgtgttctgtgtattcaactcacagagttgaacgatcctttacacagagcagacttgaaacactctttttgtggaatttgcaagtggagatttcagccattttgaggtcaatggtagaaaaggaaatatcttcgtagaaaaactagacagaatgattctcagaaactgctttgtgatgtgtgcgttcaactcacagagttcaacctttcttttcatagagcagttaggaaacactctgtttgtaaagtctgcaagtggatattcagacctctttgaggccttcgttggaaacgggatttcttcatattatgctagacagaagaattcccagtaacttccttgtgttgtgtatgttgaactcacagagttgaactttcatttacacagagcagatttgaaacactctttttgtggaatttgcaaatggagatttcaagcactttgaggccaaaggcagaaaaggaaatatcttcatataaaaactagacagaatcattctcagaaactgctctgcgatgtgtgcgttcaactctcagagtttaacttttcttttcattcagcagtttggaaacactctgtttgtaaagtctgcacgtggataatttgatcacgtagaggccttcgatggaaacggttttttttcatgtaaggctagacagaagaattcccagtaacttccttgtgttgtgtacattcaactcacagagttgaacgttcccttagacagagcagatttgaaacactctttttgtgcaattggcaagtggagatttcaagcgctttaaggtcaatggcaaaaaaggaaatatcttcgtttcaaaactagacagaatcattcccacaaactgcgttgtgatgtgttcgttcaactcacagagtttaacctttcttttcatagagcagttaggaaacactctgtttgtgaactctgcaagtggatattctgacatcttgtggcctttgttggaaacgggatttcttcatattctgctagacagaagaattctcagtaacttccttgtgttgtgtgtattcaactcacagagttgaacgatcctttacacagagcagacttgaaacactctttttgtggaatttgcaagtggagatttcagccactttgagttcaatggtagaataggaaatatcttcctatagaaactagacagaatgattctcagaaactcctttgtgatgtgtgcgttcaactcacagagttcaacctttcttttcatagagcagttgggaaacactctgtttgtaaagtctgcaagtggatattcagacttctttgaggccttcgttggaagcaggatttcttcatattctgctagacagaagaattcccagtaacttccttgtgttgtgtgtcttcaactcacagagttgaactttcatttacacagagcagatttgaaacactctttttgtggaatttgcaaatggagatttcaagcgctttgaggccaaaggcagaaaaggaaatatcttcggtataaaaacttgacagaatcattctcagaaactgctctgcgatgtgtgcgttcaactctcagagtttaacttttcttttcattcagcagtttgaaaacactctgtttgtaaagtctgcacgtggataatttgactacttagaggccttcgttggacacgggtttttttcatgtaaggctagacagaagaattcccagtaacttccttgtgttctgtgcattcaactcacagagttgaacgttccctcagacagagcagatttgaaacactctatttgtgcaatttgcaagtgtagatttcaagcgctttaaggtcaacggcagaaaaggaaatatcttcgtttcaaaactagacagaatgattctcagaaactcctttgtgatgtgtgcgttcaactcacagagtttaacctttcttttcatagagcagttaggaaacactctgtttgtaaagtctgcaagtggatattcagacatctttgaggccttcattggaaacgggatttcttcatgttctggtagacacaagaattctcagaaacttccttgtgttgtgtgttttcaactcacagagttgaacgatgctttacacagagtagacttgaaacactctttttgtgtaatttgcaagtggagatttcagccgctttgaagtcaatggtagaaaaggaaatatcttcgtataaaaactagacagaatgattctcagaaactcctttgtgatgtgtgcgttcaactcacagagtttaacctttcttttcatagagcagttaggaaacactctgtttgtaaagtctgcaagtggatattcagacctctttgaggccttcgttggaaaggggatttcttcatattctgctagagagaagaattcccagtaacttccttgtgttgtgtgtgttcaactcacagagttgaactttgatttacacagagcagatttgaaacactctttttgtggaatttgcaagtggggatttcaagcgctttgaggccaaaggcagaaaaggaaatatcttcgtataaaaactagacagaatcattctcagaaactgctctgtgatgtgtgcgttcaactctcagagttgaacttttcttttcattcagcagtttggaaacactctgtttgtaaagtctgcacgtggatattttgaccacttagaggcgttagttggaaacgcgtttttttcatgtaaggctagacagaagaattcccagtaacttccttttgttgtgtgcattcaactcacagagttgaacgttcccttagacagagcagatttgaaacactgtttttgtgcaatttgcaagtggagatttcaagcgctttaaggtcaatggcagaaaaggaaatatcttcgtttcaaaactagacagaatcattcccacaaactgcgttgtgatgtgttcgttcaactcacagagtttaacctttcttttcatagagcagttaggaaacagtctgtttgtgaattctgtaagtggatattctgacatcttgtggccttcgttggaaatgggatttcttcatattctgctagacagaagaattctcagtaacttccttgtgttgtgtgtattcaactcacagagttgaacgatcatttacacagagcagacttgtaacactctttttgtggaatttgcaagtggagatttcagccgctttgaagtcaaaggtagaaaaggaaatatcttcctataaaaactagacagaatgattctcagaaactcctttgtgatgtgtgcgttcaactcacagagttcaacctttcttttcatagagcagtttggaaacactctgtttgtaaagtctgcaagtggatattcagacttctttgaggccttcgttggaagcgggatttcttcatattctgctagacagaagaattctcagtaactgccttgtgttgtgtgtattcaactcacagagttgaacgatcctttacacagagcagacttgaaacactctttttgtggaatttgcaagtggagatttcagccgctttgaggtcaatggtagaataggaaatttcttcctatagaaactagacagaatcattctcagaaactgctctgcgatgtgtgcgttcaactctcagagtttaacttttcttttcattcagcagtttggaaacactctgtttgtaaagtctgcacgtggataacttgaccacttagaggccttcgttggaaacgggtttttttcatgtaaggctagacagaagaattcccagtaacttccttgtgttgtgtgcattcaactcacagagttgaacgttcccttagacagagcagatttgaaacactctatttgtgcaatttgtaagtgtagatttcaagcgctttaaggtcaatggcagaaaaggaaatatcttcgtttcaaaactagacagaatcattcccacaaactgcgttgtgatgtgttcgttcaactcacagagtttaacctttctgttcatagagcagttaggaaacactctgtttgtaaagtctgtaagtggatattctgacatcttgtggcccttcgttggaaactggatttctccatattctactagacagaataattctcagtaacttccttgtgttgtgtgtattcaactctcagagttgaacgatccttctacagagagcagacttgaaacactctttttgtggaatttgcaagtggagatttcagccgctttgaggtcaatagtagaaaaggaaatatcttcgtagaaaaactagacagaatgattctcagaatctcctttgtgatgtgtgcgttcaactcacagagtttaacctttcttttcatagagcagttaggaaacactctgtttgtaaagtctgcaagtggatattcagacctctttgaggccttcgttggaaacgggttttttcatataaggctagacagaagaattcccagtaacttccttgtgttgtgtgtgttcaactcacagagttgaactttcatttacacagagcagatttgaaacactctttttgtggaatttgcaattggagatgtcaagcgctttgaggccaaaggcagaaaaggaaatatcttcgtttcaaaactagacagaatcattctcagaaactgctgcatgatgtgtgcgttcaactctcagagtttaacttttcttttcattcagcggtttggaaacactctgtttgtaaagtctgcacgtggatattttgaccacttagaggccttcgttggaaacgggtttttttcatgtaaggctagacagaagaattcccagtaacttccttgtgttgtgtgcattcaactcacagagttgaacgttcctttagacagagcagatttgaaacactctatttgtgcaatttgcaagtgtagatttcaagcgctttaaggtcaacggcagaaaaggaaatatcttcgtttcaaaactagacagaatgattctcagaaactcctttgtgatgtgtgcgttcaactcagagagttcaacctttcttttcatagagcagttgggaaacactctgtttgtaaagtctgcaagtggatattcagacttctttgaggccttcgttggaagcgggatttcttcatgttctgctagacagaagaattctcagaaacttccttgtgttgtgtgttttcaactcacagagttgaacgatcctttacacagagcagacttgaaacactccttttgtggaatttgcaagtggagatttcagccggtttgaggtcaatggtagaataggaaatatcttcctatagaaagtagacagaatgattctcagaaactcctttgtgatgtgtgcgttcaactcacagagtttaacctttcttttcatagagcagttaggaaacactctgtttgtaaagtctgcaagtggatattcagacctccttgaggccttcgttggaaacgggatttcttcatattttgctagacagaagaattctcagtaacttccttgtgttgtgtgtattcaactcacagagttgaacgatcctttacacagagaagacttgaaacactctttttgtggaatttgcaagtggagatttcagccgctgtgagttcaatggtagaataggaaatatcttcctatagaaactagacagaatcattctcagaaactgctctgcgatgtgtgcgttcaactctcagggtttaacttttcttttcattcagcagtttggaaacactctgtttgtaaagtctgcacgtggataatttgaccacttagaggtcttcgttggaaacgggtttttttcatgtaaggctagacagaagaattcccagtaacttccttgtgttgtgtgcattcaactcacagagttgaacgttcccttagacatagcagatttgaaacactctctttgtgcaatttgcaagtgtagatttcaagcgctttaaggtcaacggcagaaaaggaaatatcttcgtttcaaaactagacagaatgattctcagaaactcctttgtgatgtgtgcgttcaactcacagagtttaacctttcttttcatagagcagttaggaaacactctgtatgtaaagtctgcaagtggatattcagacctccttgaggccttcgttggaaatgggatttcttcatattctgctagacagaagaattctcactaacttccttgtgttgtgtgtattcaactcacagagttgaacgatcctttacacagagcagacttgaaacactctttttgtggaatttgcaagtggagatttcagccgctttgaggtcaatggtagaaaaggaaatatcttcgtataaagactagacagaatgattctcagaaactcctttgtgatgtgtgcgttcaactcacagagtttaacctttctttccatagagcagttaggaaacactctgtttgtaaagtctgcaggtggatattcagacctccttgaggccttcgttggaaacgggatttcttcatattatgctagacagaagaattctcagtaacttccttgtgttgtgtgtattcaactcacagagttgaactttcatttggagagagcagatttgaaacactgtttttgtggaatttgcaagtggagatttcaagcgctttggggccaaaggcagaaaaggaaatatcttcgtataaaaactagacagaatgattctcagaaactcctttgtgatgtgtgcgttcaactcacagagtttaacctttcatttcatagagcagttaggaaacactctgtttgtaaagtctgcaagtggatattcagacatccttgaggctttcgttggaaacgggatttcttcatattctgctagaaagaagaattctcagtaacttccttgtgttgtgtgtattcaactcacagatttgaacgatcgtttacacagagcagacttgagacactctttttgtggaatttgtaagtggagatttcagccgctttgaggtcaatggtagaaaaggaaatatcttcatataaaaactagacagaatgattctcagaaactcctttgtgatgtgtgcgttcaactcacagagtttaacctttcttttcatagagcagttaggaaacactctgtttgtaaagtctgcaagtgaatattcagacctctttgaggccttcgttggaaacgggatttcttcatattaagctagacagaagaattctcaataacttccttgtgttgtgtgtattcaactcacagagttgaacgatcctttacacagagcagacttgaaacactctttttgtggaatttgcaagtggagatttcagccgctttgaggtcaatggtagaataggaaatatcttcctatagaaagtagacagaatgattctcagaaactcctttgtgatgtgtgcgttcagctcacagagtttaacctttcttttcatagagcagttaggaaacactgtgtttgtaaagtctgcaagtggatattcagacctccttgaggccttcgttggaaacgggatttcttcatattatgctagacagaagaattctcagtaacttccttctattctgtgtattcaactcacagagttgaacgatcctttacacagagcagacttgaaacgctcttttggtggaattggcaagtggagaattcagccgctttgagatcaatggtagaataggaaatatattcctatggaaactagagagaatgattctcagaaactcctttgtgatgtgtgcgttcaactcacagagtttaacctttcttttcatagagcagttaggaaacactctgtttgtaaagtctgcaagtggatactcagacctctttgaggccttcgttggaaacgggatttcttcatattatgctagacagaagaattcccagtaacttccttgcgttgtgtacattcaactcacagagttgaacgttcccttagacagagcagatttgaaacactctttttgtgcaattggcaagtggagatttcaagcgctttaaggtcaatggcagaaaaggaaatatcttcgtttcaaaactagacagaatcattcccacaaactgcgttgtgatgtgttcgttcaactcacagagtttaacctttctgttcatagagcagttaggaaacactctgtttgtaaagtctgcaagtggatattcagacctctttgaggccttcgttggaaacgggatttcttcatattatgctacacagaggaattctcaggaacttccttgtgttgtgtgtattcaactcacagagttgaacgatcctttacacagagcagacttgaaacactctttttgtggaatttgcaagtggagatttcagccgctttgagttcaaaggtagaataggaaatatcttcctatagaaagtacacagaatgattctcagaaacttctttgtgatgtgtgcgttcaactcacagagtttaacctttcttttcatagagcagttaggaaacactctgtttgtaaactctgcaagtcgatattcagacctctttgaggccttagttggaaacgggatttcttcatactatgctagacagaagaattctcagtaacttccttgtgttgtgtgtattcaactgacagagttgaactttcatttagagagagcagatttgtaacactgtttttgtggaatttgcaagtggagatttcaagagctttggggccaaaggcagaaaaggaaatatcttcgtataaaaactagacagaatcattctcagaaactgctctgcgatgtgtgcgttcaactctcagagtttaactttgcttttcattcagcagtttggaaacactctgtttgtaaagtctgcacgtggataatttgaccacttagaggccttcgttggaaacgggtttttttcatgtaaggctagacagaagaattcccagtaacttccttgtgttgtgtgcattcaactcacagagttgaacgttcccttagacagagcagatttgaaacactctatttgtgcaatttgcaagtgtagatttgaagcgctttaaggtcaatggcagaaaaggaaatatcttagtttcaaaactagacagaatcattcccacaaactgctttgtgatgtgttcgttcaactcacagagtttaagctttctgttcatagagcagttaggaaacactctgtttgtaaagtctgcaagtggatattcagacctccttgaggccttcgttggaaacgggatttcttcatattctgctagacagaagaattctcagtaacttccttgtgttgtgtgtattcaactcacagagttgaacgatcctttacatagagcagacttgtaacactctttttgtggaatttgcaagtggagatttcagccgctttgaagtcaaaggtagaaaaggaaatatcttcctataaaaactagacagaatgattctcagaaactcctttgtgatgtgtgcgttcaactcacacagtttaacctttcttttcatagagcagttaggaaacactctgtttgtaaagtctgcaagtggatattcagacctcccttgaggtcttcgttggaaacgggatttcttcatattatgctagacagaagaattcccagtaacttccttgtgttgtgtgtgttcaactcacagagttgaactttcatttacacagagcagatttgaaacactctttttgtataatttgcaaatggagatttcaagcgctttgaggccaaaggcagaaaaggaaatatcttcttataaaaactagacagaatcattctcagaaactgctctgcgatgtgtgcgttcaactctcagagtttaacttttcttttcattcagcagtttggaaacactctggttgtaaagtctgcacgtggatattttgaccacttagaggccttcgttggaaacgggtttttttcctgtaaggctagacagaagaattcccagtaacttccttgtgttgtgtacattcaactcacagagttgaacgttcccttagacagagcagatttgaaacactctttttgtgcaactggcaaatggagatttcaagcgctttaaggtcaatggcagaaaaggaaatatcttcgtttcaaaactagacagaatgattctcataaactcctttgtgatgtgtgcgttcaacacacagagtttaacctttctgttcatagagcagttaggaaacactctgtttgtaaagtctgtaagtggatattctgacatcttgtggccttcgttggaaacgggttttcttcatattctgctagacagaagaattctcagtaacttccttgtgttgtgtgtattcaactcacagagttgaacgatcctttacacagaggagacttgtaacactctttttgtggaatttgcaagtggagatttcagccgctttgaagtcaaaggtagaaaaggaaatatcttcctataaaaactagacagaatgattctgagaaactcctttgtgatgtgtgcgttcaactcacagagtttaacctttcttttcatagagcagttaggaaacactctgtttgtaatgtgtgcaagtggatattcagacctccttgaggccttcgttggaaacgggatttcttcatattatgctagacaaaagaattctcagtaacttccttgtgttgtgtgtattcaactcacagagttgaacgatcctttacacagagcagactggaaacactctttttgtggaatttgcaagtggagatttcagccgctttgaggtcaatggtagaataggaaatatcttcctatagaaactagacagaatcattctcagaaactgctgtgtgatgtgtgcgttcaactctcagagtttaacttttcttttcattcagcggtttggaaacactctgtttgtaaagtctgcacgtggaaattttgaccacttagaggccttcgtggaaacgggtttttttcatgtaaggctagacagaagaattaccagtaacttccttgtgttgtgtgcattcaactcacagagttgaacgttcccttagacagagcagatttgaaacactctatttgtgcaatttgcaagtgtagatttcaagcgctttaaggtcaatggcagaaaaggaaatatcttcgttttaaaactagacagaatcattcccacaaactgcgttgtgatgtgttcgttcaactcacagagtttaacctttcttttcatagagcagttaggaaacagtctgtttgtaaattctgtaagtggatattctgacatccttgtggccttcgttggaaacgggatttcttcatattctgctagacagaagaattctcagaatcttccttgtgttgtgtgtattcaactcacagagttgaacgatggtttacacagagcagatttgaaacactctttttgtggaatttgcaagtggagatttcagccgctttgaggtcaatggtagaaaaggaaatatcttcatataaaaactagacagaatgattctcagaaactcctttgtgatgtgtgcgttcaactcacagagtttaacctttcttttcatagagcagttaggaaacactctgtttgtaaagtctgcaagtggatattccgacctccttgaggccttctttggaaacgggatttcttcatattatgctagacagaagaattcccagtaacttccttgtgttgtgtgtgttcaactcacagagttgaactttcatttacacagagcagatttgaaacactctttttgtggcatttgcaagtggagatttcaagcgctttgaggccaaaggcagaaaaggaaatatcttcgtttcaaaactagacagaatcactctcagaaactgctctgcgatgtgtgcgttcaactctcagagtttaacttttcttttcattcagcagtttggaaacactctgtttgtaaagtctgcacgtggatattttgaccacttagaggccttcgttggaaacgggtttttttcctgtaaggctagacagaagaattgtcagaatcttccttgtgttgtgtgtattcaacacacagagttgaatgatggtttacacagagcagatttgaaacactcttttggtggaatttgcaagtggagatttcagccgctttgaggtcaatggtagaaaaggaattatcttcgtttcaaaactagacagaatcattctcacaaactgcgttgtgatgtgttcgttcaactcacagagtttaacctttctgttcatagagcagttaggaaacactctgtttgtaaagtctgtaagtggatattctgacatcttgtggccttcattggaaacgggatttcttcatattctgctagacagaagaattctcagtaacttccttgtgttgtgtgtattcaactcacagtagttgaacgatcctttacacagagcatacttgaaacactcttgttgtggaatttgcaagtggagatttcagccactttgaggtcaatggtagaaaaggaaatatcttcgtataaaaactagacagaatgattctcagaaactcttttgtgatgtgtgcgttcaactcacagagtttaacctttctgttcatagagccgttaggaaacactctgtttgtaaagtctgcaagtggatattcacacctccttgtgaccttcgttggaaacgggatttcttcatattctgctagacagaagaattctcagtaacttccttgtgttgtgtgtattcaactgacagagttgaactttcatttagagagagcagatttgaaacactgtttttgtggaatttgcaagtggagatttcaagcgctttggggccaaaggcagaaaaggaaatatcttcctatgaaaactagacagaatcattctcagaaactgctgtgtgatgtgtgcgttcaactctcacagtttaacttttcttttcattcagccgtttggaaacactctgtttgtaaagtctgcacgtggatattttgaccacttaaaggccttcgttggaaacgggtttttttcatgtaaggctagacagaagaattcccagtaacttccttgtgttctgtgcattcaactcacagagttgaacgttcccttagacagagcagatttgaaacactctatttgtgcaatttgcaagtgtagatttcaagcgctttaaggtcaataacagaaaaggaaatatcttcgtttcaaaactagacagaatcattctcacaaactgcgttgtgatgagttcgttcaactcacagagtttaacctttctgttcatagagcagttaggaaacactctgtttgtaatgtctgtaagtggatattctgacatcttgtggccttcgttggaaacgggatttcttcatattctgctagacagaagaattctcagtaacttccttgtgttgtgtgtattcaactcacagagttgaacgatcctttacacagagcagtcttgaaacactctttttgtggaatttgcaagtggagatttcagccgttttgaggtcaatggtagaaaaggaaatatcttcgtataaagactagacagaatgattctcagaaactcctttgtgatgtgggtgttcaactcacagagttaacctttcttttcatagagcagttaggaaacactctgtttgtaaagtctgcaagtggatattttcacctctttgaggccttcattggaaacgggttttttttcatgtaaggctagacagaagaattctcagtaccttccttgtgttgtgtgtattcaactgacagagttgaactttcatttagacagagcagatttgaaacactctttttctggaatttgcaagtggagatttcaagcgctttgaggccaaaggcagaaaaggaaatatcttcgtataaaaactagacagaatcattctcagaaattgctgcgtgatgtgtgcgttcaactctcagagtttaacttttcttttcattcagcggtttggaaacactctgtttgtaaagtctgcacgtggatattttgaccacttagaggccttcgttggaaacgggtttttttcatgtaaggctagacagaagaattcccagtaacttccttgtgttgtgtgcattcaactcacagagttgaacgttcccttagacagagcagatttgaaacactctatttgtgcaatttgcaagtgtagatttcaagcgcattaaggtcaatggcagaaaaggaaatatcttcgtttcaaaattagacagaatcattccacaaactgcgttgtgatgtgttcgttcaactcacagagtttaacctttctgttcatagagcagttaggaaacactctgtaaagtctgtaagtggatattctgacatcttgtggccttcgttgtaaacgggatttcttcatattctgctagacagaagaattctcagaatcttccttgtgttgtgtgtattcaactcacacagttgaacgattgtttacacagagcagatttgaaacactctttctgtggaatttgcacgtggagatttcagccgctttgaggtcaatggtagaaaaggaaatatacttcgtataaaaactagacagagtgattctcagaaactcctttgtgatgtctgcgttcaactcacagagtttaacctttcttttcatagagcagttaggaaacactctgtttgtaaagtctgcaagtggatattcagacatccttgaggctttcgttggaaacgggatttcttcatattctgctatacagaagaattctcagtaacttcccttgtgttgtgtgtattcaactgacagagttgaactatcatttagagagagcagatttgaaacactgttttgtggaatttgcaagtggagatttcaagcgctttggggccaaaggcagaaaaggaaatatcttcgtataaaaactagacagagtcattctcagaaactgctgcgtgatgtgtgtgttcaactctcagagtttaacttttcttttcattcagcggtttggaaacacgctgtttgtaaagtctgcacgtggatattttgaccacttagaggccttcgttggaaacgggtctttatcatgtaaggctagacagaagaattcccagtaacttccttgtgttgtgtacattcaactcacagagttgaacgttcccttagacagagcagatttgaaacactctttttgtgcaattgggaaatggagatttcaagcgctttaaggtcaatggcagaaaaggaaatatcttcgtttcaaaactagacagaatcattcccacaaactgcgttgtgatgtgttcgttcaactcacagagtttaacctttctgttcatagagcagttaggaaacactctgtttgtaaagtctgtaagtggatattctgacatcttgtggccttcgttggatacgggatttcttcatattctgctagacagaagaattctcagtaacttccttgtgttgtgtgtattcaactcacagagttgaacgatcctttacacagagcagacttgtaacactctttttgtggaatttgcaagtggagatttcagccgctttgaagtcaaaggcagaaaaggaaatgtcttcgtttcaaaactagacagaatgattctcagaaactcctttgtgatgagtgcgttcaactcacagagtttaacctttcttttcatagagcagttaggaaacactctgtttgtaaagtgtgcaagtggatattcagacctctttgaggccttcgttggaaacgggatttcttcatattctgctagacagaggaattctcaggaacttccttgtgttgtgtgttttcaactcacagagttgaacgatcctttacacagagcagacttgaaacactccttttgtggaatttgcaagtggagatttcagccgctttgaggtcaatggtagaataggaaatatcttcctatagaaactagacagaatcattctcagaaactgctgcgtgatgtgtgcgttcaactctcagagtttaacttttcttttcattcagcggtttggaaacactctgtttgtaaagtctgcacgtggaaattttgaccacttagaggccttcgttggaaacgggttttttttcatgtaaggctagacagaagaattcccagtaacttccttgtgttgtgtgcattcaactcacagagttgaacgttcccttagacagagcagatttgaaaaactctatttgtgcaatttgcaagtgtagatttcaagcgctttaaggtcaatggcagaaaaggaaatatcttcgtttcaaaactagacagaatgattctcagaaaatcttttgtgatgtgtgcgttcaactcacagagtttaacttttcttctcatagagcagttaggaaacactctgtttgtaaagtctgcaagtggatattcagacgtctttgaggccttcgttggaaacgggatttcttcatattctgctagacagaataattctcagtaacttccttgtgttgtgtgtattcaactcacagagttgaaggatcctttacagagagcaggcttgaaacactctgtttgtcgaatttgcaagtggagatttcagccgctttgaggtcaaaggtagaataggaaatatcttcttatagaaactagacagaatgattctcagaaactcctttgtgatgtgtgcgttcaactcacagagtttaacatttcttttcatagagcagttaggaaacactctgtttgtaaagtctgcaagtggatattcagacctctttgaggccttcgttggaaatggctttttttcatataaggctagacagaagaattcccagtaactttccttgtgttgtgtgtgttcaactcacagagttgaactttcatttacccagagcagatatgaaacactctttttgtggaatttgcaagtggagatttcaagcgctttgaggccaaaggcagaaaaggaaatatcttcgtataaaaactagacagaatcattctcagaaactgctctgcgatgtgtgcgttcaactctcagagtttaacttttcttttcattcagcagtttggaaacactctgtttgtaaagtctgcacgtggataattggaccacttagaggccttcgttggaaacgggtttttttcatgtaaggctatacagaagaattcccagtaacttccttgtcttgtgtacattcaactcacagagttgaacgttcccttagacagagcagatttgaaacactctttttgtgcaattggcaaatggagatttcaagcgctttaaggtcaatggcaggaaaggaaatatcttcgtttcaaaactagacagaatgattctcagaaaatcttttgtgatgtgtgcgttcaactcacagagtttaacttttcttctcatagagcagttaggaaacactctgtttgtaaagtctgcaagtggatattcagacctctttgaggccttcgttggaaacgtgatttcttcatattatgctagacagaataattctcagtaactttccttgtgttgtgtgtattcaactcaccgagttgaaggatcctttacagagagcaggcttgaaacactctttttgtcgaatttgcaagtggagattacagccgctttgaggtcaatggtagaaaaggaaatatcttcgtataaagactagacagaacgattctcagaaactcctttgggatgtgtgcgttcaactcacagagtttaacctttcttttcatagagcagttaggaaacactctgtttgtaaagtctgcaagtggatattcagacctctttgaggccttcgttggaaacgggatttcttcctattctgctagacagaagaattctcagtaactttccttgtgttgtgtgtattcaactcacagagttgaacgatcctttacacagagcagacttgaaacactctttttgtggaatttgcaagtggagatttcagccgctttgaggtcaatagtagaaaagtaaatatcttcgtagaaaaactagacagaatcattctcagaaactgctctgcgatgtgtgcgttcaactctcagagtttaacttttcttttcattcagcagtgtggaaacactctgtttgtaaagtctgcccgtggatattttgaccacttagaggccttcgttggaaacgggtttttttcctgtaaggctagacagaagaattcccaggaacttccttgtgttgtgtacattcaactcacagagttgaacgttcccttagacagagcagatttgaaacactctttttgtgcaattggcaagtggggatttcagccgctttgaggtcaatggtagaaaaggaaatatcttcgtataaaaactagacagaatcattcccaaaaactgcgttgtgatgtgtgcgttcaactcacagagtttaacctttcttttcatagagcagttaggaaacactctgtttgtaaactctgcaagtggatattcagacctctttgaggccttcgttggaaacgggatttcttcatactgtgctagacagaagaattctcagtaacttccttgtgttgtgtgtattcaactcacacagttgaatgatcctttacacagagcagacttgaaacactctttttgtggaatttgcaagtggagatttcagccgctttgagttcaatggtagaataggaaatatcttcttatagaaactagacagaatgattctcagaaacttctttgtgatgtgtgcgttcaactcacagagtttaacctttcttttcatagagcagttaggaaacactctgtttttaaactctgcatgtggatattcagacctctttgaggccttcgttggaaacgggatttcttcatactgtgctagacagaagaattcccagtaacttcctagtgttgtgtgtgttcaactcacagagttgaactttcatttacacagagcagatttgaaacactctttttgtggaattttcaagtggaaatttcaagcgctttgaggccaaaggcagaaaaggaaatatcttcgtataaaaactagacagaatcattctcagaaactgctctgtgatgtgtgcgttcaactctcagagtttaacttttcttttcattcagcactttggaaacactctgtttgtaaagtcttcacgaggatattttgaccacttagaggtctttgttggaaacgggtttttttcccataaggctagacagaagaattcccagtaacttccttgtgttgtgtgcattcaactcacagagttgaacgttcccttagacagagcagatttgaaacactctatttgtgcaatttgcaagtgtagatttcaagcgctttaaggtcaacggcagaaaaggaaatatcttcgtttcaaaaccagacagaatcattccctcaaactgcgttgtgatgtgttcgttcaactcacagagtttaacctttctgttcatagagcagttaggaaacactctgtttgtaaagtctgtaagtggatattctgacatctggtggccttcgttggaaacgggatttcttcatattctgctagacagaagaattctcagtaacttccttgtgttgtgtgtattcaactcacagagttgaacgatcctttacacagagcagacttgaaacactctttttgtggaatttgcaagtggagatttcagccgctttgatgtcaatggtagaaaaggaaataacttcgtataaagactagacagaattattctcagaaactcctttgtgatgtgtgtgttcaactcacagagtttaacctttcttttcatagagcagttagtaaacactctgtttataaagtctgcaagtggatattcagacccctttgaggccttcgttggaaacgggatttcttcatattctgctagacagaagaattcccagtaacttccttgtgttgtgtgtgttcaactcacagagttgaacttccatttacacagagcagatttgaaacactctttttgtggaatttgcaagtggagatttcaagcgctttgaggccaaaggcagaaaaggaaatatcttcgtttcaaaactagacagaatcattctcagaaactgctctgcgatgtgtgcgttcaactctcagagtttaacttttcttttcattcagcagtttggaaacactctgtttgtaaagtccgcacgtggatattttgaccatttagaggccttcgttggaaacgggtttttttcttgtaaggctagacagaagaattcccagtaacttccttgtgttgtgtgcattcaactcacagagttgaacgttcccttagacagagaagatttgaaacactctatttgtgcaatttgcaagtgtagatttcaagcgctttaaggtcaacggcagaaaaggaaatatcttcgtttcaaaaccagacagaatcattcccacaaactgcgttgtgaagtgttcgttcaactcacagagtttaacctttctgttcatagagcagttaggaaacactctgtttgtaaagtctgtaagtggatattctgacatcttgtggccttcgttggaaacgggatttcttcatattctgctagacagaataattctcagtaacttccttgtgttgtgtgtattcaactcacagagttgaacgatcctttacagagagcagagttgaaactctctttttgtggaatttgcaagtggagatttcagccgctttgaggtcaatggtagaaaaggaaatatcttcctatagaaactagacagagtgattctcagaaactcctttgtgatgtctgcgttcaactgacagagtttaacctttcttttcatagagcagttaggaaacactctgtttgtaaagtctgcaagtggatattcagacctccttgaggccttcgttggaaacgggatttcttcatattatgctagacagaagaattctcagtaacttccttgtgttgtgtgtattcaactcacagaattgaacgatcctttacacagagcagacttgaaacactctttttgtggaatttgcaagtggagatttcagccgctttgaggtcaatggtagaataggatatatcttcctacagaaactagacagaatcattctcagaaactgttgtgcgatgtgtgcgttcaactctcagagtttaacttttcttttcattcaggagtttggaaacactctgtaaactctgcatgtggatattttgaccacttagaggccttcgttggaaacgggtttttttcctgtaaggctagacagaagaattcccagtaacttccttgtgttgtgtacattcaactcacagagttgaacgttcccttagacagagcagatttgaaacactctttttgtgcaattggcaagtggagatttcaagcactttgaggtcaatggcagaaaaggaaatatcttcgtttcaaaactagacagaatcattcccacaaactgcgttgtgatgtgttcgttcatctcacagagtttaacctttcttttcatagagcagttaggaaacagtctgtttgaaaattctgtaaggggatattctgacatcttgtggccttcgttggaaacgggatttcttcatattctgctagacaaaagaattctcagtaacttccttgtgttgtgtgtattcaactcgcagagttgaacgatcctttacacagagcagacttgaaacactctttttgtggaatttgcaagtgaagatttcagccgctttaaggtcaatggtagaaaagggaatatcttcgtataaagactagacagaatgattctcagaaactcctttgtgatgtgtgtgttcaactcacagagtttaacctttcttttcatagagcagttagtaaacactctgtttataaagtctgcaagtggatattcatacccctttgaggccttcgttggaaacgggatttcttcatattatgctagacagaagaattctcagtaacttccttgtgttgtgtgtattcaactgacagagttgaactttcatttagatagagcagatttgaaacactgtttttgtggaatttgcaagtggagatttcaagcgctttggggccaaagcagaaaaggaaatatcttcgtataaaaactagacagaatcattctcagaaattgctctgcgatgtgtgcgttcaactctcagagtttaacttttcttttcattcagcagtttggaaacactctgtttgtaaagtctgcacgtggatattttgaccatttagaggccttcgttggaaacgggtttttttcttgtaaggctagacagaagaattcccagtaacttccttgtgttgtgtacattcaactcacagagttgaacattcccttagacagagcagatttgaaacactctttttgtgcaattggcaagtggtgatttcagccgctttgaggtcaatggtagaaaaggaaatatcttcgtataaaaactagacagaatgattctcagaaactcctttgtgatgtgtgagttcaactcacagagtttatcctttcttttcatagagcagttaggaagcactctgtttgtaaagtctgcaagtggatattcagacctctttgaggccttcgttggaaacgggatttcttcatattctgctagacagaagaattctcagtaacttccttgtgttgtgtgcattcaactcacagagttgaacgatcctttacacagggcagacttgaaacactctttttgtggaatttgcaagcggacatttcagcctctttaaggttaatggtagaaaatgaaatatcttcgtatagaaactagacagaatgattctcagaaactcctttgtgatgtgtgcgttcaactcacagagttgaacctttcttttcatagagcagttaggaaacactctgtttgtaaagtctgcaagtggatattcagacatccttgaggctttcgttggaaacaggatttcttcatattctgctagaaagaagaattcccaataacttccttgtgttgtgtgtgttcaactcacagagttgaactttcatttacacagagcagatttgaaacactctttttgtggaatttgcaagtggagatttcaagcgctgtgaggccaaaggcagaaaaggaaatatcttcgtataaaaactagacagaatcattctcagaaactgctgcgtgatgtgtgcgttcaactctcagagtttaagttttcttttcattcagcggtttggaaacactctgtttgtaaagtctgcacgtggatattttgaccacttagaggccttcgttggaaacgggtttttttcatgtaaggctagacagaagaattcccagtaacttccttgtgttgtgtgcattccactcacagagttgaacgttcccttagacagagcagatttgaaacactctatttgtgcaatttgtaagtgtagatttcaagcgctttaaggtcaatggcagaaaaggaaatatcttcgtttcaaaactagacagaatgattctcagaaacttcattgtgttgtgagcgttcaactcacagagtttaacctttcttttcatagagcagttaggaaacactctgtttgtaaactctgcaagtggatattcagacctctttgaggccttcgttggaaacgggatttcttcatactgtgctagacagaacaattctcagtaacttccttgtgttgtgtgtattcaactcacagagttgaacgatcctttacacagagcggacttgaaacactctttttgtggaatttgcaagtggagatttcagccgcgttgaggtcaatggtagaaaaggaaatatcttcgtataaaaagtagacagaatgattctcagaaactcctttgtgatgtgtgtgttcaactcacagagtttaacctttcttttcatagagcagttagtaaacactctctttataaagtctgcaagtggatattcagacccctttgaggccttcgttggaaacgggatttcttcatattatgctagacagaagaattctcagtaacttccttgtgttgtgtgtattcaactgacagagttgaacattcatttggagagagcagatttgaaacactgtttttgtggaatttgcaagtggagatttcaagcgctttggggccaaaggcagaaaaggaaatatcttcgtataaaaactagacagaatgattctcagaaactcctttgtgatgtgtgcgttcaactctcagagtttaacttttcttttcattcagcagttcggaaacactctgtttgtaaagtctgcacgtggatattttgaccacttagaggccttcgttggaaacgggtttttttcctgtaaggctagacagaagaattcccagtaacttccttgtgttgtgtgcattcaactcacagagttgaacgttcccttagacagagcagatttgaaacactctatttgtgcaatttgcaagtgtagatttcaagcgctttaagagtcaatggcagaaaaggaaatatcttcatctcaaaactagacagaatgattctcagaaactcctttgagatgtgtgcgttcaactcacagagtttaacctttcttttcatagagcagttaggaaacactctgtttgtaaattctgcaagtggatattcagacctctttgaggccttcgttggaaacgggatttcttcatattatgctagacagaaggattctcagtaacttccttgtgttgtgtgtattcaactcacagagttgaacgatcctttacacagagcagacttgaaacactctttttgtggaatttgcaagtggagatttcagccgctttgaggtcaatggtagaaaaggagatatcttcgtataaaaactagacagaatgattctcagaaactctttgggatgtgtgcgttcaactcacagagtttaacttttcttttcatagagcagttaggaaacactctgtttgtaaagtctgcaagtggatattcagacctctttgaggccttcgttggaaacgggatttcttcatattatgctagacagaagaattctcagtaacttccttgtgttgtgtgtattcaactcacagagttgaaggatcctttacacagagcagactagaaacattctttttgtggaatttgcaagtggagatttcagccgctttgaggtcaatggtagaatgggaaatatcatcctatagaaactagacagaatcattctcagaaactgctgcgtaatgtgtgcgttcaactctcagagtttaacttttcttttcattcagcggtttggaaacactctgtttgtaaagtctgcacgtggaaattttgaccatttagaggccttcgttggaaacgggtttttttcatgtaaggctagacagaagaattcccagtaacttccttgtgttgtgtgcattcaactcacagagttgaacgatcctttacacagagcagacttgaaacactctttttgtggaatttgcaagtggagatttcagccgctttgaggtcaatggtagaaaaggaaactatcttcatataaagactagacagaatcattcccacaaactgcgttgtgaggtgttcgttcaactcacagagtttaacctttcttttcatagagcagttaagaaacagtctgtttgtaaattctgtaagtggatattctgacatcttgtggccttcgttggaaacgggatgtcttcatattctgctagacagaagaattctcagaatcttccttgtgttgtgtgtatttaactcacagagttgaacgatcctttacacagagcagacttgaaacactctttttgtggaatttgcaagtggagatttcagccgctttgaggtccatggtagaaaaggaaatatcttcgtataaaaactagacagaatgattctcagaaactcctttgtgatgtgtgcgttcaacacacagagttcaacctttcttttcctagagcagttgggaaacactctgtttgtaaagtctgcaagtggatattcagacttctttgaggccttcgttggaagcgggatttcttcatattctgctagacagaagaattcccagtaacttccttgtgttgtgtgtgttcaactcacagagttgaactttgatttacacagagcagatttgaaacactctttttgtggaatttgcaagtggagatttcaagcgctttgaggccaaatgcagaaaaggaaatatcttcgtataaaaactagacagaatcattctcagaaactgctctgcgatgtgtgcgttcaactctcagagtttaacttttcttttcattcagcagtttggaaacactctgtttgtaaagtctgcaggtggataatttgaccacttagaggccttcgttggaaacgggtttttttcctgtaaggctagacagaagaattcccagtaacttccttgtgttgtgtgcattcaactcacagagttgaaagttcccttcgacagagcagatttgaaacactctatttgtgcaatttgcaagtgtagatttcaagcgctttaaggtcaacggcagaaaaggaaatatcttcgtttcaaaactagacagaatcattcccacaaactgcgttgtgatgtgttcgttcaactcacagagtttaacctttctgttcatagaggagttaggaaacactctgtttgtaaagtctgtatgtggatattctgacatcttgtggccttcgttggaaacgggatttctttatattctgctagacagaacaattctcagtaacttccttgtgttgtgtgtattcaactcacagagttgaacgatcctttacacagagcggacttgaaacactctttttgtggaatttgcaagcggagatttcagctgcgttgaggtcaatggtagaaaaggaaatatcttcgtataaaaactagacagaatgattctcagaaacttcattgtgatgtgtgcgttcaactcacagagtttaacctttcttttcatagagcagttaggaaacactgtttgtaaactctgcaagtggatattcagacctctttgaggccttcgttggaaacgggatttcttcatactgtgctagacagaagaattcccagtaacttccttgggttgtgtgtgttcaactcacagagttgaactttcatttacacagagcagatttgaaacactctttttgtggaatttgcaaatggagatttcaagcgctttgaggaaaaaggcagtaaagggaatatcttcgtataaaaactagacagaatcattctcagaacctgctctgtgatgtgtgcgttcaactctcagagtttaacttttcttttcattcagcagtttggcaacactctgtttgtaaagtctgcacgtggataatttgaccacttagaggccttcgttggaaacgggtttttttcatgtaaggctagacagaagaattctcagtaacttccttgtgttgtgtgtattcaactcacagagttgaacgatcctttacacagagcagacttgtaacactctttttgtggaatttgaaagtggagatttcagccgctttgaagtcaaaggtagaaaaggaaatatcttcctataaaaactacacagaatcattcccaaaaactgcgttgtgatgtgttcgttcatctcacagagtttaacctttcttttcatagagcagttaggaaacactctgtttgtaaattctgtaagtggatattctgacatcttgtggccttcgttggaaacgggatttcttcatattctgctagacagaagaattctcagtaacttccttgtgttttgtgtattcaactcacatagttgaacgatcctttacacagagcagacttgaaacactctttttgtggtatttgcaagtggagatttcagccactttgaggtcaatgttagaaaaggaaatatcttcgtataaaaactagacagaatgattctcagaaactcctttgtgatgtgtgcgttcaactcacacagtttaacctttcttttcatagagcagttaggaaacactctgtttgtaaagtctgcaagtggatattcagacctccttgaggccttcgttggaaacgggatttgttcatattatgctagacagaagaattctcagtaacttccttgtgttgtgtgtattcaactgacagaattgaactttcatttagagagagcagatttgaaacactgtttttgtggaatttgcaagtggagatttcaagcgctttggggccaaaggcagaaaaggaaatatcttcgtataaaaactagacagaaatcattctcagaaactgctgcgtgatgtgtgcgttcacctctcagagtttaacttttcttttcattcagcggtttggaaacactctgtttgtaaagtctgcacgtggaaattttgaccacttagaggccttcgttggaaacgggtttttttcatgtaaggctagacagaagaattcccagtaacttccttgtgttgtgtgcattcaactcacagagttgaacgttcccttagacagagcagatttgaaacactctatttgtgcaatttgcaagtgtagatttcaagcgctttaaggtcaatgacagaaaaggaaatatcttcgtttcaaaactagacagaatgattctcaaaaactcctttgtgatgtgtgcgttcaactcacagagtttaacctttcttttcatagagcagttaggaaacactctggttgtaaagtctgcaagtggatattaagacctctttgaggccttcgttggaaacgggatttcttcatattctgctagacagaagaattctcagtaacttccttgtgttgtgtgtattcaactcacagagttgaacgatcctttacacagagcagacttgaaacactctttttctggaatttgcaagtggagatttcagccgctttgaggtcaatggtaggataggaaatatcttcctatagaaactagacagaatgattctcagaaactcctttgtgatgtgtgcgttcaactcacagagtttaacctttcttttcatagagcagttaggaaacactctgtttgttaagtctgcaagtggatattcagacctccttgaggccttcgttggaagcgggatttcttcatattctgctagacagaagaattcccagtaacttccttgtgttgtgtgtgttcaactcacagagctgaactttcatttacacagagcagatttgaaacactctttttgtggaatttacaaatggagatttcaagcgctttgaggccaaaggcagaaaaggaaatatcttcgtttcaaaactagacggaatgattctcagaaactgctctgcgatgtgtgcgttcacctctcagagtttaacttttcttttcattcagcagtttggaaacactctgtttgtaaagtctgcacgtgcataatttgaccacttagaggccttcgttggcaacgggtttttttcatgtaaggctagacagaagaattcccaggaacttccttgtgttgtgtacattcaactcacagagttgaacgttcccttagacagagcagatttgaaacactctttttgtgcaatgggcaagtggtgatttcagccgctttgaggtcaatggtagaaaaggaaatatcttcgtataaaaactagacagaatgattctcataaactcctttgtgatgtgcgcgttcaactcacagagtttaacctttcttttcatagagcagttaggaaacactctgtttgtaaagtctgcaagtggatattcagacctctttgaggccttcgttggaaacgggatttctttatattctgctagacagaagaattctcagtaacttccttgtgttgtgtttattcaactcacagagttgaatgttcctttacacagagcagacttgaaacactctttttgtggaatttgcaagtggagatttcagccgctttgaggtcaatggtagaaaagtaaatatcttcgtataaagactagacagaatgattctcagaaacttctttgtgatgtgtgcgttcaactcacagagtttaacctttcttttcatagagcagttaggaaacactctgtttctaaactctgcaagtggatattcagacctctttgaggccttcgttggaaacgggatttcttcatactatgctagacagaagaattctcaagtaacttccttgtgttgtgtgtattcaactcacagagtttaacgatcctttacacagagcagacttgtaacactctttttgtggaatttgcaagtggagatttcagccgctttgaagtcaaaggtagaaaaggaaatatcttcctataaaaactagacagaatcattctcagaaactgctctgcgatgtgtgcgttcaactcacagagtttaacttttcttttcattcagcagtttggaaacactctgtttgtaaagtctgcacgtggataatttgaccacttagaggccttcgttggaaacgggtttttttcatgtaaggctagacagaagaattcccagtaacttccttgtgttgtgtgcattcaactcacagagttgaactttcccttagacggagcagatttgaaacactctatttgtgcaatttgcaagtgtagatttcaagcgctttaaggtcaatggcagaaaaggaaatatcttcgtttcaaaactagagagaatcattcccacaaactgcgttgtgatgtgttcgttcaactcacagagtttaacctttctgttcatagagcagttaggaaacactctgtttgtaaagtctgtaagtggatattccgacctccttgaggccttcgttggaaacgggatttcttcatattctgctagacagaagaattctcagaaacttcctggtgttgtgtgttttcaactcacagagttcaacgatcctttacacagagtagacttgaaacactctttttgttgaattggcaagtggagatttcagctgctttgaggtcaatggtagaaaaggaaatatcttcgtacaaaaactagacagaatgattctcagaaaatcctttgtgatgtgtgcgttcaactcacagagtttaacttttcttttcatagagcagttaggaaacactctgtttgtaaagtctgcaagtggatattcagaccactttgaggccttcattggaaacgggatttcttcatattgtgctagacggaagaattctcagaaacttccttgtgttgcgtgttttcaactcacagagttcaacgatccgttacacagagtagacttgaaaaactctttttgttgaattggccagtggagatttcagccgctttgaggtcaatggtagaaaaggaaatatcttcgtataaaaactagacagaatcattctcagaaacggctctgcgatgtgtgcgttcaactctcagagtttaacttttcttttcattcagcagtttggaaacactctgtttgtaaagtctgcacgtggatattttgaccacttagaggccttcgtttgaaacgggtttttttcctttaaggctagagagaagaattcccagtaacatccttgtgttgtgtgtgttcaactcacagagttgaactttcatttacacagagcagatttgaaacactctttttgtggaatttgcaagtggagatttcaagcgctttgaggccaaaggcagaaaaggaaatatccttcgtttcaaaactagacagaagcattctcagaagctgctctgcgatgtgtgcgttcaactctcagagtttaacttttcttttcattcagcagtttggaaacactctgtttgtaaagtctgcacgtggataatttgaccacttagaggccttcgttggaaacgggtttttttcatgtaaggctagacagaagagttctcagtaacttccttgtgttgtgtgtattcaactcacacagttgaacgatcctttacacagagcagacttgtaacactctttttgtggaatttgcaagtggagatttcagccgctttgaagtcaaagtagaaaaggaaatatcttcctataaaaactagacagaatgattctcagaaacttctttgtgatgtgtgcgttcaactcacagagtttaacctttcttttcatagagcagttaggaaagactctgtttgtaaagtctgcaagtggatattcagacctctttgaggccttcgttggaaacgggtttttttcatataaggctagacagaagaattctcagtaacttccttgtgttgtgtgtattcaactgacagagttgaactttcatttagagagagctgatttgaaacactgtttttgtggaatttgcaagtggagatttcaagcgttttggggccaaaggcagaaaaggaaatatcttcgtataaaaactagacagaatcattctcagaaactgctgcgtgatgtgtgcgttcaactctcagagtttaacttttcttttcattcagcggtttggaaacactctgtttgtaaagtctgcacgtggatattttgaccacttagaggccttcgttggaaacgggttttttttcatgtaaggctagacagaagaattcccagtaacttccttgtgttgtgtgcattcaactcacagagttgaacgttcccttacacagagcagatttgaaacactctatttgtgcaatttgcaagtgtagatttcaagcgctttaaggtcaacggcagaaaaggaaatatcttcgtttcaaaactagacagaatcattcccacaagctgcgttgtgatgtgttcgttcaactcacagagtttaacctttctgttcatagagcagttaggaaacactctgtttgtaaagtctgtaagtggatattctgacatcttgtggccttcgttggaaatgggatttcttcatattctgctggacagaagaattctcagtaacttccttgtgttgtgtgtattcaactcacagagttgaacgatcctttacacagagcagacttgaaacgctctttttgtggaatttgcaagtggagatttcagccgcgttgaagtcaatggtagaaaaggaaatatcttcgtataaaaactagacagaatgattttcagaaactcctttgtgatgtgtgcgttcaattcacagagtttaacttttcatagagcagttaggaaacactctgtttgtaaagtctgcaagtggatattcagacctctttgaggccttcgttggaaacgggatttcttcatattatgctagacagaataattctcagtaacttccttgtgttgtgtgtattcaactcacagatttgaacgatcctttacagagagcagacttgaaacactctttttgtggaatttgcaagtggagatttcagctgctttgaggtcaatggtagaaaaggaattatcttcgtagaaaaactagacagaatcattctcagaaactgctgcgtgatgtgtgcgttcaactgtcagagtttaacttttcttttcattcagcggtttggaaacactctgtttgtaaagtctgcacgtggatattttgcccacttagaggccttcgttggaaacgggtttttttcatgtaaggctagacagaagaattcccagtaacttccttgtgttgtgtgcattcaactcacagagttgaacgttcccttagacagagcagatttgaaacactctatttgtgcaatttgcaagtgtagatctcaagcgctttaaggtcaatgggagaaaaggaaatatcttcgtttcaaaactagacagaatcattcccacaaactgcgttgtgatgtgttcgttcaactcacagagtttaacctttcttttcatagagtagttaggaaacagtctgtttgtaaattctgtaagtggatattctgacatcttgtggccttcgttggaaacgggatttcttcatattctgctagacagaagaattctcagtaacttccttgtgttgtgtgtattcaactcacagagttgaacgatcctttacacagagcagacttgaaacactctttttgtggaatttgcaagtggagatttcagccgctttgaggtcaatgttagaaaaggaaatatcttcctatagaaactagacagaatgattctgagaaactcctttgtgatgggtgcgttcaactcacagagtttaacctttcttttaatagagcagttaggaaacactctgtttgtaaagtctgcaagtggatattcagacatctttggggcattcgttggaaacgggatttcttcatattctgctagacagaagaattctcagtaacttccttgtgttgtgtgtattcaactgacagagttgaactttcatttagagagagcagatttgaaacactatttttgtggaatttgcaagtggagattacaagcgcttttgggccaaaggcagaaaaggaaatatcttcgtataaaaactagacagaatcattctcagaaactgctctgcgatatgtgcgttcaactctcagagtttaacttttcttttcattcagcagtttggaaacactctgtttgtaaagtctgcatgtgcgtaatttgaccacttagaggccttcgttggaaacaggttttgttcatgtaaggctagacagaagaattcccagtaacttaccttgtgttgtgtacattcaactcacagagttgaacgttcccttagacagagcagatttgaaacactctttttgtgcaattggcaagtggagatttcaagcgctttaaggtcaatggcagaaaaggaaatatcttcgtttcaaaactagacagaatcattcccacaaacttcgttgtgatgtgttcgttcaactcacagagtttaacctttctgttcatagagcagttaggaaacactctgtttgtaaagtctgtaagtggatattctgacatcttgtggccttcgttggaaacgggatttcttcatattctgctagacagaagaattctcagaaccttccttgtgttctgtgcattcaactcacagagttgaacgatcctttacacagagcagacttgaaacactctttttgaggaatttgcaagtggagatttcagccgctttgaggtccatggtagaaaaggaaatatcttcgtataaaaactagacagaatgattctcagaaagtccgttgtgatgtgtgcgttcaactcacagagtttaacctttcttttcatagagcagttaggaaacactctgtttgtaaagtctgcaagtggatattcagacctctttgaggccttcgttggaaacgggatttcttcatattatgctagacagaagaattcccagtaacttccttgtgttgtgtgtgttcaactcacagagttgaactttcatttacacagagcagatttgaaacactctttttatggaatttgcaaatggagatttcaagcgctttgaggccaaaggcagaaaaggaaatatcttcgtataaaaactagacagaatcattctcagaaactgctgcgtgatgtgtgcgttcaactctcagagtttaacttttcttttcattcagcggtttggaaacactctgtttgtaaagtctgcacgtggatattttgaccacttagaggccttcgttggaaacgggttttttacatgtaaggctagacagaagaattcccagtaacttcccttgtgttgtgtacattcaactcacagagttgaacgttcccttagacagagcagatttgaaacactctttttgtgcaattggcaaatggagatttcaagcgctttaaggtcaatggcagaaaaggaaatatcttcgtttcaaaactagacagaatcattcccacaaactgcgttgtgatgtgttcgttcaactcacagagtttaacctttcttttcatagagcacttaggaaagagtctgtttgtaaattctgtaagtggatattctgacatcttgtggccttcgttggaaacgggatttcttcatattctgctagacagaagaattctcagaaacttccttgtgttgtgtgttttcaactcacagaattgaacgatgctttacacagagtagacttgaaacactctttttgtgtaatttgcaagtggagatttcagccgctttgaggtcaatggtagaaaaggaaatatcttcgtataaaaactagacagaatgattctcagaaactcctttgtgatgtgggcgttcaactcacagagtttaacctttcttttcatagagcagttaggaaacactctgtttgttaagtctgcacgtggatacttggacttctttgaggccttcgttggaaacgggtttttttcatgtaaggctggacagaagaattctcagtaacttccttgtgttgtgtgtattcaactcacagagttgaatgatcctttacagagagcagacttgaaacactctttttgtggaatttgcaagtggagatttcagccgctttgaggtcaatggtagaataggaaatatcttcctatagaaactagacagaatcattctcagaaactgctctgcgatgtgtgcgttcaactctcagagtttaactttgcttttcattcagcagtttggaaacactctgtttgtaaagtctgcacgtggataatttgaccacttagaggccttcgttggaaacgggtttttttcatgtaaggctagacagaagaattcccagtaacttgccttgtgttgtgtgcattcaactcacagagttgaacgttcccttagacagagcagatttgaaacactctagttgtgcaatttgcaagtgtagatttcaagcgctttaaggtcaatggcagaaaaggaaatatcttcgtttcaaaactagacagaaatgattctcagaaactcctttgtgatgtgtgcgttcaactcacagagtttaacctttcttttcatagagcagttaggaaacactctgtttgtaaagtctgcaagtggatattcagacctccttgaggccttcgttggaaacgggatttcttcatattatgctagacagaagaattctcagtaaattccttgtgttgtgtgtattcaactcacagagttgaacgatcctttacacagagcagacttgaaacactctttttgtgaaatttgcaagtggagatttcagccgctttgtggtcaatggtagaataggaaatatcttcctatagaaactagacagaatgattctcagaaactcctttgtgatgtgtgtgttcaactcacagagtttaacctttcttttcatagaacagttagtaaacactctgtttataaagtctgcaagtggatattcagacccctttgaggccttcgttggaaacgggatttcttcatattatgctagacagaagaattctcagtaacttccttgtcttgtgtgtattcaactcacagagttgaacgatcctttacacagagcagacttgaaacactccttttgtggaatttgcaagtggagatttcagccgctttgaggtcaatggtagaataggaaatatcttcctatagaaactagacagaatgattctcagaaactcctttgtgacgtgtgtgttcaactcacagagtttaacctttcttttcatagagaagttagtaaacactctgtttataaagtctgcaagtggatattcagacccctttgaggccttcgttggaaacgggatttcttcatattatgctagacagaagaattcccagtaacttccttgtgttgtgtgtgttcaactcacagagttgaactttcatttacacagaacagatttgaaacactctttttgtggaatttgcaagtggagatttcaagcgctttgaggccaaaggcagaaaaggaaatatcttcgtttcaaaactagacagaatcattctcagaaactgctctgtgatgtgtgcgttcaactctcagagtttaacttttctgttcattcagcagtttggaaacactctgtttgtaaagtctgcacgtggataatttgaccacttagaggccttcgttggaaacgggtttttttcatgtaaggctagacagaagagttctcagtaacttccttgtgttgtgtgtattcaactcacacagttgaacgatcctttacacagagcagacttgtaacactctttttgtggaatttgcaaatggagatttcagccgctttgaagtcaaagtagaaaaggaaatatcttcctataaaaactagacagaatcattcccacaaactgcgttgtgatgtgttcgttcaactcacagagtttaacctttcttttcatagagcagttaggaaacagtctgtttgtaaattctgtaagtggatattgtgacatcttgtggcctttgttggaaacgggatttcttcatattctgctagacagaagaattctcagtaacttccttgtgttgtgtgtattcaactcacagagttgaacggtcctttacacagagctgacttgaaccactctttttgtgggatttgcaagtggagatttcagccgctttcaggtcaatggtagaataggaaatatcttcctatagaaactagacagaatgattctcagaaactcctttgtgatgtgtgtgttcaactcacagagtttaacctttcttttcatagagcagttagtaaacactctgtatataaagtctgcaagtggatattcagacccctttgaggccttcgttggaaacgggatttcttcatattatgctagacagaagaattctcagtaacttccttgtgttgtgtgtattcaactgacagagttgaactttcatttggagagagcagatttgaaacactgtttttgtggaatttgcaagtggagatttcaagcgctttggggccaaaggcagaaaaggaaatatcctcgtataaaaacatgacagaaatcattctcagaaaccgctctgtgatgtgtgcgttcaactctcagagtttaacttttctttccattcagcagtttggaaacactctgtttgtaaagtctgcacgtggatattttgaccacttagaggtcttcgttggaaacgggtttttttcatgtaaggctagacagaagaattcccagtaacttccttgtgttgtgtgcattcaactcacagagatgagcgttcccttagacagagcagatttgaaacactctatttgtgcaatttgcaagtgtagatttcaagcgctttaaggtcaatggcagaaaaggaaatatcttcgtttcaaaactagacagaatcattcccacaaactgcgttgtgatgtgttcgttcaactcacagagtttaacctttcttttcatagagcagttaggaaacagtctgtttgttaattctgtaagtggatattctgacatcttgtggccttcgttggaaacgggatttcttcatattctgctagacagaagaattctcagtaacttccttgtgttgtgtgtattcaactcacagagttgaatgatcctttacacagtacagtcttgaaacactctttttgtggaatttgcaagtggagatttcagccgctttgaggtcaatggtagaataggaaataccttcctatagaaactagacagaatgattctcaaaaacttctttgtgatgtgtgcgttcaactcacagagtttaacctttcttttcatagagcagttaggaaacactctgtttgtaaactctgcaagtggatattcagacctgtttgaggccttcgttggaaacgggatttcttcatactatgctagacagaagaattctcagtaacttccttgtgttgtgtgtattcaactgacagagttgaactttcatttagagagagcagatttgaaacactgtttttgtggaagttgcaagtggagatttcaagcgctttggggccaaaggcagaaaaggaaatatcttcgtataaaaactagacagaatcattctcagaaactgctgcgtgatgtgtgcgttgaactctcagagtttaacttttcttttcattcagcggtttggaaacactctgtttgtaaagtctgcacgtggaaattttgaccacttagaggccttcgttggaaacgggattttttcatgtaaggctagacagaagaattcccagtaacttccttgtgttgtgtgcattcaactcacagagttgaacgttccgttagacagagcagatttgaaacactctatttgtgcaatttgcaagtgtagatttcaagcgctttaaggtcaatggcagaaaaggaaatatcttcgtttcaaaactagacagaatcattcccacaaactgcgttgtgatgtgttcgttcaactcacagagtttaacctttctgttcatagagcagttaggaaacactctgtttgtaatgtctgtaagtggatattctgacatcctgtggccttcgttggaaacgggatttcttcatattctgctagacagaagaattctcagtaactgccttgtgttgtgtgtattcaactcacagagttgaacgatcctttacacagagcagacttgaaacactccttttgtggaatttgcaagtggagatttcagctgctttgaggtcaatggtagaataggaaatatcttcctatagaaagtagacagaatgattctcagaaactcctttgtgatgtgtgcgttcaactcacagagtttaccctttcttttcatacagcagttgggaaacactctgtttgtaaagtctgcaagtggatattcagacctccttgaggctttcgttggaaacgggatttcttcatattctgctagaaagaagaattcccagtaacttccttgtgttgtgtgtgttcaactcacagagttgaactttcatttacacagagcagatttgaaactctctttttgtggaatttccaagtggagatttcaagcgctttgaggccaaaggcagaaaaggaaatatcttcgtttcaaaactagacagaatcattctcagaaactgcactgcgatgtgtgcgttcaactctcagagtttaacttttcttttcattcagcagtttggaaacactctgtttgtaaagtctgcacgtggataatttgaccacttagaggccttctttggaaacgggtttttttcatgtaaggctagacagaagaattcccagtaacttcccttgtgttgtgtgtgttcaactcacagagttgaactttcatttacacagagcagatttgaaacactctttttgtggaatttgcaagtggagatgtcaagcgctttgaggccaaaggcagaaaaggaaatatcttcgtttcaaaactagacagaatcattcccacaaactgcgttgtgatgtgttcgttcaactcacagagtttaacctttcttttcatagagcagttaggaaacactctgttggtaaattctgtaagtggatattctgacatcttgtggccttcagtggaaacgggatttcttcatattctgctagacagaagaattctcagaaacttccttgtgttgtgtgttttcaactcacagagttgaacgatgctttacacagagtagacttgaaacactctctttgtgtaatttgcaagtggagatttcagccgctttgaggtcaatggtagaaaaggaaatatcttcgtataaaaactagacagaatgattctcagaaactcctttgtgatgtgtgcgttcaactcacagagttcaacctttcttttcatagagcagttaggaaacactctgtttataatgtctgcaagtggatattcagacctctttgaggccttctttggaaacgggatttcttcatattctgctagacagaagaattcccagtaacttccttgtgttgtgtgtgttcaactcacagagttgaactttcatttgcacagagcagatttgaaacactctttttgtggaatttgcaagtggagatttcaagcgctttgaggccaaaggcagaaaagaaggaaatatattcgtataaaaactagacagaatcattctcagaaactgctctgcgatgtgtgcgttcaactctcagagtttaacttttcttttcattcagcagtttggaaacactctgtttgtaaagtctgcacgtggataacttgaccacttagaggacttcgttggaaacgggtttttttcctgtaaggctagacagaagaattcccagtaacttccttgtgttgtgtacattcaactcacagagttgaacgttccctaagacagagcagatttgaaacactctttttgtgcaattggcaagtggtgatttcagccgctttgaggtcaatggtataaaaggaaatatcttcgtataaaaactagacagaatcattcccacaaactgcgttgtgacgtgttcgttcaactcacagagtttaacctttcttttcatagagcagttaggaaacagtctgtttgtcaattctttaagtggatattctgacatattgtggccttcgttggaaacgggatttcttcatattctgctagacagaagaattctcagtaacttccctgtgttgtgtgtattcaactcacagagttgaacgatcctttacacagagcagacttgagacactctttttgtggaatttgcaagtggagatttcagccgctttgaggtcaatggtagaaaaggaaatatcttcgtataaaaactagacagaatgattctcagaaactcctttatgatgtgtgcgttcaactcacagagtttaacctttcttttcatagagcagttaggaaacactcagtttgtaatgtctgcaagtggataatcagacctctttgaggccttcgttggaaacgggatttcttcatattctgatagacagaagaattcccagtaacttcccttgtgttgtgtgtgttcaactcacagagttgaactttcatttacacagagcagatttgaaactctctttttgtggaatttgcaagtggagatttcaagcgctttgaggccaaaggcagaaaaggaaatatcttcgtttcaaaactagacagaatcattctcagaaactactctgcgatgtgtgcgttcaactctcagagtttaacttttcttttcattcagcagtttggaaacactctgtttgtaaagtctgcacgtggataacttgaccacttagaggccttcgttggaaacgggtttttttcacgtaaggctagacagaagaattcccagtaacttccttgtgttgtgtacattcaactcacagagttgaacgttcccttagacagagcagatttgaaacactctttttgtgcaattggcaagtggagatttcaagcgctttgtggtcaatggcagaaaaggaaatatcttcgtttcaaaactagacagaaatcattcccacaaactgcgttgtgatgtgttcgttcaactcacagtagtttaacctttctgttcatagagcagttaggaaacactctgtttgtaaagtctgtaagtggatattctgacatcttgtggccttcgttggaaacgggatttcttcatattctgctagacagaagaattctcagaaacttccttgtgttgtgtgtattcaactcacagagttgaatgatcctttacacagaacagtcttgaaacactctttttgtggaatttgctagtggagatttcagccgctttgaggtcaatggtagaataggaaatatcttcctatagaaactagacagaatgattctcagaaactcctttgtgatgtgtgtgttcaactcacagagttcaacctttcttttcatagagcagttgggaaacactctgtttgtaaagtctgcaagtggatattcagacctccttgaggctttcgttggaaacgggatttcttcatattctgctagacagaagaattctcagttacttccttgtgttgtgtgtattcaactcacagagttgaacgatcctttacacagagcagacttgaaacactctttttgtggaatttgcaagtggagatttcagccgctttgaggtcaatggtagaaaaggaaatatcttcgtataaaaaatagacagaatcattctcagaaactgctctgcgatgtgtgcgttcaactctcagagtttaacttttcttttcattcagcagtttggaaacactctgtttgtaaagtctgcacgtggataacttgaccacttagagtccttcgttggaaacgggtttttttcatgtaaggctagacagaagaattctcagtaacttccttgtgttgtgtgtattcaactcacagagttgaacggatcctttacacagagcagacttgaaatactctttttgtggaatttgcaagtggagatttcagccgctttgaggtcaatggtagaataggaaatatcttcctatagaaactagacagaatgattctcagaaactcctttgtgatgtgtgcgttcagctcacagagtttaacctttcttttcatagagcagttaggaaacactctgtttgtaaagtctgcaagtggatattcagacatccttgaggctttcgttggaaacgggatttcttcatattctgctagaaagaagaattctcagtaacttccttgtgttgtgtgtattcaactcacagagttcaacgatcctttacacagagcagacttgaaacactctttttgtggaatttgcaagtggagatttcagccgctttgagttcaatggtagaataggaaatatcttcctatagaaactagacagaacgattctcagaaactcctttgtgatgtgtgcgttcaactcacagagtttaacctttctgttcatagagcagttaggaaacactctgtttgtaaagtctgcaagtggatattcagacctctttgaggccttcgttggaaacgggatttcttcctattctgctagacagaagaattctcagtaacttccttgtgttgtgtgtattcaaatgacagagttgaatttcatttagagagagcagattggaaacactgtttttgtggaatttgcaagtggagatttcaagcgctttggggccaaatgcagaaaaggaaatatcttcgtataaaaactagacagaatcattctcagaaactgctgcgtgatgtgtgcgttcaactctcagagtttaacttttcttttcattcagcggtttggaaacactctgtttgtaaagtctgcacgtggatattttgaccacttagaggccttcgttggaaactggtttttttcatgtaaggctagacagaagaattcccagtaacttccttgtgttctgtacattcaactcacaggagttgaacgttcccttagacagagcagatttgaaacactctttttgtgcaattggcaagtggagatttcaagcgctttaaggtcaatggcagaaaaggaaatatcttcgtttcaaaactagacagaatgattctcagaaactcctttgtgatgtgtgcgttcaactcacagagttcagcctttcttttcatagagcagttgggaaacactctgtttgtaaagtctgcaagtggatattcagacttctttgaggccttcgttggaagcgggatttcttcatattctgctagacagaagaattctcagtaacttccttgtgttgtgtgtattcaactcacagagttcaacgatcctttacacagagtagacttgaaacactctttttgtggaattggcagggtggagatttcagccgctttgaggtcaatggaagaaaaggaaatatattcgtataaaaactagacagaatgattctcataaactcctttgtgatgtgtgcgttcaactcacagagtttaacttttcttttcatagagcagttaggaaacactctgtttgtaaagtgtgcaagtggatattcagacctctttgaggccttcgttggaaacgggatttctttatattatgctagacagaataattctcagtaagttccttgtgttgtgtgtattcaactcacagagttgaacgatcctttacacagagcagacttgaaacattctttttgtggaatttgcaagtggagatttcagccgctttgaggtcaatggtagaataggaaatatcttcctatagaaactagacagaatcattctcagaaacttctctgcgatgtgtgcgttcaactctcagagtttaacttttcttttcattcagcagtttggaaacactctgtttgtaaagtctgcacgtggatattttgaccacttagaggcattcgttggaaacgggatttttcctgtaaggctagacagaagaattcccagtaacttccttgtgttgtgtacattcaactcacagagttgaacgttcccttagacagagcagatttgaaacactctttttgtgcaattggcaagtggagatttcaagcgctttaaggtcaatggcagaaaaggaaatatcttattttcaaaactagacagaatcattcccacaaactgcgttgtgatgtgttcgttcaactcacagagtttaacctttctcttcatagagcagttaggaaacactctgtttgtgaagtctgtaagtggatattctgacatcttgtggccttcgttggaaacgggatttcttcatattctgctagacagaagaattctcagtaacttccttgtgttgtgtgaattcaactcacagagttgaacgatcctttacacagagcagacttgaaacacgctttctgtggaatttgcaattggagatttcagccgctttgaggtcaatggtagaataggaaatatcttcgtataaaaactagacagaatgattctcagaaactcctttgtgatgtgtgcgttcaactcacagagtttaacttttcttttcatagagcagttaggaaacactctgtttgtaaagtctgcaagtggatattcagacctctttgaggtcttcgttggaaacgggatttcttcatattctgctagacagaagaattctcagtaacttccttgtgttgtgtgtattcaactgacagagttgaactttcatttagagagagcagatttgaaacactgtttttttggatttgcaagtggagatttcaagcgctttggggccaaaagcagaaacgtaaatatcgtcgtataaaaactagacagaatcattctcagaaagtgctctgcgatgtgtgcgttcaactctcagagtttaactttgcttttcattcagcagtttggaaacactctgtttgtaaagtctgcacgtggataatttgaccacttagaggccttcgttggaaacgggtttttttcatgtaaggctagacagaagaattccccgtaacttccttgtgttgtgtgcattcaactcacagagttgaacgttcccttagacagagcagatttgaaacactctatttgtgcaatttgcaagtgtagttttcaagctctttaaggtcaacggcagaaaaggaaatatcttcgtttcaaaactagacagaatcattcccacaaactgcgttgtgatgtgttcgttcaactcacagagtttaacctttctgttcatagagcagttaggaaacactctgtttgtaaactctgtaagtggatattctgacatcttgtggccttcgttggaaacgggatttcttcatattctgctagacagaagaattctcagtaacttccttgtgttgtgtgtattcaactcacagagttgaacgatcctttacacagagcatacttgaaacactcttcttgtggaatttgcaagtggagatttcagccgctttgaggtcaatggtagaataggaaatatcttcctatagaaactagacagaatgattctcagaaactcctttgtgatgtgtgtgttcaactcacagagtttaacctttcttttcatagagcagttaggaaacactctgtttgaaaagtctgcaagtggatattcagacctccttgtggccttcgttggaaacgggatttcttcatattctgctagacagaagaattcccagtaactttccttgtgttgtgtgtgttcaactcacagagttgaactttcatttacacagagcagatttgaaacactctttttgtggaagttgcaagtggagatttcaagcgctttgaggccaaaggcagaaaaggaaatatcttcgtttcaaaactagacagaatcattctcagaaactgctctgcgatgtgtgcgttcaactctcagagtttaacttttcttttcattcagcagtgtggaaaaattctgtttgtaaagtctgcacgtggatattttgaccacttagaggccttcgttggaaacgggtttttttcctgtaaggctagacagaagaattcccagtaacttccttgtgttgtgttcattcaactcacagagttgaacgttcccttagacagagcagatttgaaacactctttttgtgcaattggcaaatggagatttcaagcgctttaagttcaaaggcagaaaaggaaatatcttcgtttcaaaactagacagaatcattcccacaaactgcgttgtgatgtgttcgttcaactcacagagtttaacctttctgttcatagagcagttaggaaacactctgtttgtaaagtctgtaagtggatattctgacatattgtggccttcgttggaaacgggatttcttcatattctgctagacagaataattctcagtaacttccttgtgttgtgtgtattcaactcacagagttgaaggatcctttacagagagcaggcttgaaacactctttttgtcgaatttgcaagtggagatttcagccgctttgaggtcaatggtagaataggaaatatcttcttatagaacctagacaaaatgattctcagaaactcctttgtgatgtgtgtgttcaactcacagagtttaaccttgcttttcatagagcagttagtaaacactctgtttataaagtctgcaagtggatattcagacccctttgaggccttcgttggagacgggatttcttcatattatgctagacagaagaattcccagtaacttccttgtgttgtgtgtgttcaactcacagagttgaactttgatttacacagagcagatttgaaacactctttttgtggaatttgcaagtggagatttcaagcgctttcaggccaaaggcagaaaaggaaatatgttcgtataaaaactagacagaatcattctcagaaactgctctgcgatgtgtgcgttcaactctcagagtttaagttttcttttcattcagcagtttggaaacactctgtttgtaaagtctgcacgtggatattttgaccacttagaggccttcgttggaaacgggtttttttcgtgtaaggctagacagaagaattcccagtaacttccttgtgttgtgtgcattcaactcacagagttgaacgttcccttagacagagcagatttgaaacactctatttgtgcaatttccaagtgtagatttcaagcgctttaaggtcaacggcagaaaaggaaatatcttcgtttcaaaactagacagaatcattcccacaaactgcgttgtgatgtgttcgttcaaatcacagagtttaacctttcttttcatagagcagttaggaaacagtctgtttgtaaattctgtaagtggatattctgacatcttgtggccttcgttggaaacgggatttcttcatattctgctagacagaagaattcccagtaacttccttgtgttgttgtacattcaactcacagagttgaacgatcctttacacagagcagacttgaaacactctttttgtggaatttgcaagtggagatttcagccgctttgaggtccatggtagaaaaggaaatatcttcgtataaaaactagacagaaagattctcagaaactcctttgtgatgtgtgcgttcaactcacagagtttaacctttctgttcatagagcagttaggaaacactctgtttgtaaagtctgcaagtggatattcagacctctttgaggccttcgttggaaacgggtttttttcatataaggctagacagaagaattctcagtaacttccttgtgttgtgtgtattcaactgacagagttgaactttcatttggagagagcatttttgaaacactgtttttgtggaatttgcaagtggagatttcaagcgctttggggccaaaggcagaaaaggaaatatcttcgtataaaaactagacagaacgattctctgaaactcctttgtgatgtgtgcgttcaactcatagagtttaacctttctgttcatagagcagttaggaaacactctgtttgtaaagtctgcaagtggatattcagacctctttgaggcctacgttggaaacgtgtttttttcatgtaaggctagacagaagaattcccactaacttccttgtgttgtgtgcattcaactcacagagttgaacgttcccttagacagagcagatttgaaacactctatttgtgcaatttgcaagtgtagatttcaagcgctttaaggtcaacggcagaaaaggaaatatcttcgtttcaaaactagacagaatcattcccacaaactgcgttgtgatgtgttcgttcaactcacagagtttaacctttcttttcatagagcagttattaaacagtctgtttgtcaattctgtaagtggatattctgacatcttgtggccttcgttggaaacgggatttcttcatattctgctagacagaagaattctcagtaacttccttgtgttgtgtgaattcaactcacagagttgaacgatcctttacacagagcagacttgaaacactctttttgtggaatttgcaagtggagatttcagccgctttgttgtcaatagtagaataggaaatatcttcctatagaaactatacagaatgattctcagaaactcctttgagatgtgtgcgttcaactcacagagtttaacctttcttttcatagagcagttaggaaacactctgcttgtaaagtctgcaagtggatattcagccctctttgaggccttcgttggaaacgggtttttttcatataaggctagacagaagaattcccagtaacttccttgtgttgtgggtgttcgactcacagagttgaactttcatttacacagagcagatttgaaacactctttttgtggaatttgcaagtggagatttcaagcgctttgaggccaaaggcagaaaaggaaatatcttcgtttcaaaactagacagaatcattctcagaaactgctctgcgatgtgtgcgttcaactctcagattttaacttttcttttcattcagcactttggaaacactctgtttgtaaagtctgcacgtggatattttgaccacttagaggccttcgttggaaacgggtttctttcttgtaaggctagacagaagaattcccagtaacttccttgtgttgtgtacattcaactcacagagttgaacgttcccttagacagagcagatttgaaacactctttttgtgcaattggcaagtggagatttcaagcgctttaaggtcaatggcagaaaaggaaatatcttcctttcaaaactagacagaatgattctcagaaacttctttgtgatgtgtgcgttcaactcacggagtttaacctttcttttcatagagcagttaggaaacactctgtttgtaaactctgcaagtggatattcagacctctttgaggtcttcgttggaaacgggatttcttcatactatgctagacagaagaattctcagtaacttccttgtgttgtgtgtattcaactcacagagttgaacgatcctttacagagagcagacttgaagcactctttttgtggaatttgcaagtggagatttcagccgctttgaggtcaatggtagaataggaaatatcttcctatagaaactagacagaatgattctgagaaactcctttgtgatgtgtgcgttcacctcacagagtttaacctttcttttcatagagcagttaggaaacactctgtttgtaaagtctgcaagtggatattcagacctccttgaggccttcgttggaaacgggatttcttcatattatgctagacagaagaattcccagtaacttccttgtgttgtgtgtgttcaactcacagagttgaactttcatttacacagagcagatttgaagcactctttttgtggaatttgcaagtggagatttcaagcgctttgatgccaaaggcagaaaaggaaatatcttcgtataaaaactagacagaatcattctcagaaactgctctgcgatgtgtgcgttcaactctcagagtttaacttttcttttcattcagcagtgtggaaaaactctgtttgtaaagtctgcacgtggatattttgaccacttagaggccttcgttggaaacgggtttttttcctgtaaggctagacagaagaattcccagtaacttccttgtgttgtgtacattcaactcacagagttgaaggttcccttaaacagagcagacttgtaacactctttttgtggaatttgcaagtggagatttcagccgctttgaagtcaaaggtagaaaaggaaatatcttcctataaaaactagacagaatgattctcagaaactcctttgtgatgtgtgcgttcaactcacagagttcaacctttgttttcatagagcagttgggaaacactctgtttgtaaagtctgcaagtggatattcagacttctttgaggccttcgttggaagcgggatttcttcatattctgctagacagaagaattctcagtaacttccttgtgttgtgtgtattcaactcacagagttgaatgatcctttacacagagcagacttgaaacactctttttgtggaatttggaagtggagatttcagcccgctttgagttcaatggtagaataggaaatatcttcctatagaaactagacagaatgattcacagaaactcctttgtgatgtgtgcgttcaactcacagagtttaacctttcttttcatagagcagttaggaaacactctgtttgtaaagtctgaaagtggatattcagacatctttgaggccatcgttggaaacgggatttctacatattctgctagagagaagaattctcagtaacttcgttgtgttgtgtgtattcaactcacagagttgaacgatcctttacacagaacagacttgaaacactctatttgtggaatttgcaagtggagatttcagccgctttgaggtcaatggtagaataggaaatatcttcctatagaaactagacagaatgattctcagaaactcctttgtgatgtgtgcgttcaactcacagagtttaacttttcttttcattcagcagtttggaaacactctgtttgtaaagtctgcacgtggctattttgaccacttagattccttcgatggaaacgggtttttttcatgtaaggctagacagaagaattcccagtaacttccttgtgttgtgtacattcaacacacagagttgaacgttcccttagacagagcagatttgaaacactctttttgtgcaattggcaagtggagatttcaagcgctttaaggtcaatggcagaaaagtaaatatcttcgtttcaaaactagacagaatcattcccacaaactgcgttgtgatgtgttcgttcaacccacagagtttaaccattcttttcatagagcagttaggaaacactctgtttgtaaattctgtaagtggatattctgacatcttttggccttcgttggaaacgggatttcttcatattctgctagacagaagaattctcagaatcttccttgtgttgtgtgtcttcaactcacagagttgagcgatggtttacacagagcagatttgaaacactctttttgtggaatttgcaagtggagatttcagccgctttgaggtcaatggtagaaaaggaaatgtcttcgtataaaaactagacagaatgattctcagaaacttctttgtgatgtgtgcgttcaactcacagagtttaacctttcttttcatagagcagttaggaaacactctgtttgtaaactctgcaagtggatattcagacctctttgaggccttcgttggaaacgggatttcttcatattatgcctgagagaagaattctcagtaacttccttgtgttgtgtgtattcaactgacagagttgaactttcatttagagagagcagatttgaaacactgtttttgtggaatttgcaagtggagatttcaagcgctttggggccaaaggcagaaaaggaaatatcttcgtataaaaactagagagaatcattctcagaaactgctctgcaatgtgtgcgttcaactctcagagtttaacttttcttttcattcagcagtttggaaacactctgtttgtaaagtctgcacgtggataatttgaccacttagagaccttcattggaaacgggtttttttcctgtaaggctagacagaagaattcccagtaacttccttgtgttgtgtgcattcaactcacagagttgaacgttcccttagacagagcagatttgaaacactctatttgtgcaatttgcaagtgtagatttcaagcgctttaaggtcaacggcagaaatggaaatatcttcgtttcaaaactagacagaaatcattcccacaaactgcgttgtgatgtgttcgttcaactcacagtagtttaacctttctgttcatagagcagttaggaaacactctgtttgtaaagtctgtaagtggatattctgacatcttgtggccttcgttggaaacgggatttcttcatattctgctagacagaagaaatctcagaatcttccttgtgttgtgtgtattcaactcacagagttgaacgatcctttacacagagcagacttgaaacactctttttgtggaatttgcaagtggagatttcagccgctttgaggtccatggtagaaaaggaattatcttcgtataaaaagtagacagaatgattctcagaaactcctttgtgatgtgtgcgttcaactcacagtagtttaacctttcttttcatagagcagttaggaaacactctgtttgtaaagtctgcaagtggatattcagacttccttgaggccttcgttggaaacgggtttttttcatataaggctagacagaagaattctcagtaacttccctgtgttgtgtgtattcaactgacaaagtcgaactttcatttagagagagcagatttgtaacattgtttttgtggaatttgcaagtggagatttcaagcgctttggggccaaaggcagaaaatgaaatatcttcgtataaaaactagacagaatcattctcagaaactgctctgcgatgtgtgcgttcaactctcagagtttaacttttcttttcattcagcagtttggaaacactctgtttgtaaagtctgcacgtggatattttgaccacttagaggccttcgttggaaacgggtttctttcctgtaaggctagacagaagaattcccagtaacttccttgtgttgtgtacattcaagtcacagagttgaacgttcccttagacagagcagatttgaaacactctttttgtgcaattggcaagtggagatttcaagcgctttaaggtcaatggcagaaaaggaaatatcttcgtttcaaaactagacagaatcattcccacaaactgcgttgtgatgtgttcgttcaactcacagagtttaacctttcttttcatagagcagttaggaaacagtctgtttgtcaattctgtaagtggatattctgacagcttgtggccttcgttggaaacgggatttcttcatattctgctagacagaagaattctcagaatcttccttgtgttgtgtgtattcaactcacagagttgaacgatcctttacacagagcggacttgaaacactctttttgtggaatttgcaagtggagatttcagccgcgttgaggccaaaggcagaaaaggaaatatcttcgtttcaaaactagacagaatgattctcataaactcctttgtgatgtgtgcgttcaactcacagagtttaacctttcttttcatagagcagttaggaaacactctatttgtaaagtctgcaagtggatattcagacctccttgaggccttcgttggaaacgggatttcttcatattctgctagacagaacaattcccagtaacttccttgtgttgtgtgtgttcaactcacagagttgaactttcatttacacagagcagatttgaaacactctttttgtggaatttgcaagtggagatttcaagcgctttgaggtcaatggcagaaaaggaaatatcttcatataaaaactagacagaatcattctcagaaactgctctgcaatgtgtgcgttcaactctcagagtttaacttttcttttcattcagcagtttggaaacactctgtttctaaagtctgcacgtggatattttgaccacttagaggccttcgttggaaacgggtttttttcctgtaaggctagacagaagaattcccagtaacttccttgtgttgtgtacattcaactcacagagttgaacgttcccttagacagagcagatttgaaacactctttttgtgcaattggcaagcggagatttcaagcgctttaaggtcaatggcagaaaaggaaatatcttcgtttcaaaactagacagaatcattcccacaaactgcgttgtgatgtgttcgttcaactcacaggagtttaacctttcttttcatagagcagttaggaaacagtctgtttgtaaattctgtaaatggatattctgacatcttgtggccttcgttggaaactggatttcttcatactatgctagacagaataattctcagtaacttccttgtgttgtgtgtattcaactcacagagttgaacgatcctttacacagagcagacttgaaacattctttttgtggaatttgcaagtggagatttcagccgctttgaggtcaatggtagaataggaaatatcttcctatagaaactagacagaatgattctcagaaactcctttgtgatgtgtgtgttcaactcacagagtttaacctttcttttcatagagcagttagtaaacactctgtttataaagtctacaagtggatattcagacccctttgaggccttcgttggaaacgggatttcttcatattatgctagacagaagaattcccagtaacttccttgtgttgtgtgtgttcaactcacagagttgaactttcatttacacagagcagatttgaaacactctttttgtggaatttgcaagtggagatttcaagcgatttgaggccaaaggcagaaaaggaaatatcttcgtataaaaactagacagaatcattctcagaaactgctctgcgatgtgtgcgttcaactctcagagtttaacttttcttttcattcagcattttggaaacactctgtttgtaaagtctgcacgtggatattttgaccacttagaggccttcgttggaaacgggtttttttcctgtaaggctaaaaagaagaattcccagtaacttccttctgttgtgtacattcaactcacagagttgaacgctcccttagacagagcagatttgaaacactctttttgggcaattggcaagtggagattacaagcgctttaaggtcaatggcagaaaaggaaatatcttcgtttcaaaactagacagaatgattctcagaaacttctttgtgatgtgtgcgttcaactcacagagtttaacctttcttttcatagaacagttaggaaacactctgtttgtaaacactgcaagtggatattcagacctctttgaggccttcgttggaaacgggatttcttcatactatgctagacagaagaattctcagtaacttccttgtgttgtgtgtattcaactcacagagttgaacgatcctttacacagagcagacttgaaacactctttttgtggaatttgcaactggagatttcagccgcgttgaggtcaatggtagaaaaggaaatatcttcgtataaaaactggacagaatgattctcagaaacttctttgtgatgtgtgcgttcaactcacagtgtttaacctttcttttcatagagcagttaggaaacactctgtttgtaaactctgcaagtggatattcagacctctttgaggccttcgttggaaacgggatttcttcatactgtgctagacagaagaattcccagtaacttccttgtgttgtgtgtgttcaactcacagagttgaactttcatttacacagagcagatttgaaacactctttttgtggaatttgcaagtggagatttcaagcgctttgaggtcaaaggcagaaaaggaaatatcttcgtttcaaaactagacagaatcattctctgaaactgctgcgtgatgtgttcgttcaactctcagagtttaacttttcttttcattcagcggtttggaaacactctgtttgtaagtctgcacgtggatattttgaccacttagacgccttcgttggaaacgggtttttttcatgtaaggctagacagaagaattcccagtaacttccttgtgttgtgtgcattcaactcacagagttgaacgttcccttagacagagcagatttgaaacactctatttgtgaaatttgcaagtgtagatttcaagcgctttaaggtcaatggcagaaaaggaaatatcttcgtttcaaaactagacagaatcattcccacaaactgcgttgttatgtgttcgttcaactcacagagtttaacctttctgttcatagagcagttaggaaacactctgtttgtaaagtctgtaagtggatattctgacatcttgtggccttcgttggaaaagggatttcttcatattctgctagacagaataattctcagtaacttccttgtgttgtgtgtattcaactcacagagttgaacgatcctttacagagagcagacttgaaacactctttttgtggaatttggaagtggagatttcagccgctttgaggtcaaaggtagaataggaaatatcttcctacagaaaatagacagaatgattctcagaaactcctttgtgatgtgtgtgttcaactcacagagtttaacctttcttttcatagagcagttagtaaacactctgtttataaagtctgcaagtggatattcagacccctttgaggccttcgttggaaacgggattgcttcatattatgctagacagaagaattctcagtaacttcccttgtgttgtgtgtattcaactgacagagttgaactttcatttagagagagcagatttgaaacactgtttttgtggaatttgcaaatggagatttcaagcgctttggggccaaaggcagaaaaggaaatatcttcgtataaaaactagacagaatcattctcagaaactgctctgcgatgtgtgcgttcaactctcagagtttaacttttcttttcattcaacagtttggaaacactctgtttgtaaagtctgcacgtggatattttgaccacttagaggccttcgttggaaacgggtttctttcctgtaaggctagacagaagaattcccagtaacttccttgtgttgtgtgcattcaactcacggagttgaacgttccctaagacagagcagatttgaaacactctatttgtgcaatttgcaagtgtagatttcaagcgctttaaggtcaacggcagaaaaggaaatatcttcgtttcaaaactagacagaatcattcccacaaactgcgttgtgatgtgttcgttcaactcacagagtttaacctttcttttcatagagcagttaggaaacactctgtttgtaaactctgcaagtggatattcagacctctttgaggccttcgatggaaacgggatttctccatactatgctagacagaagaattctcaataacttccttgtgttgtgtgtattcaactcacagagttgaacgatcctttacacagagcagacttgaaacactcttgttgtggaatttgcaggtggagatttcagcctctttgaggtcaatggtagaataggaaatatcttcctatagaaactagacagaatggttctcagaaactcctttgtgatgtgtgtgttgaactcacagagtttaacctttcttttcatagagcagttagtaaacactctgtttataaagtctgcaagtggatattcagacccctttgaggccttcgttggaaacgggatttcttcatattatgctagacagaagaattctcagtaacttccttgtgttgtgtgtattcaactgacagagttgaactttcatttagagagagcagatttgaaacactctttttgtggaatttgcaagtggagatttcaagtgctttggggccaaaggcagaaaaggaaatatcttcgtataaaaactagacagaatcattctcagaaactgctgcgtgatgtgtgcgttcaactctcagagtttaacttttcttttcattcagcagtttggaaacactctgtttgtaaagtctgcacgtggaaattttgaccacttagaggccttcgttggaaacgggtttttttcatgtaaggctagacagaagaattcccagtaacttccttgcgttgtgtacattcaactcacagagttgaacgttcccttagacagagcagatttgaaacactctttttgtgcaattggcaagtggagatttcaagcgctttaaggtcaatggcagaaaaggaaatatcttcgtttcaaaactagacagaatgattctcagaaactcctttatgatgtgtgcgtttaactcacagagtttaacctttcttttcattgagcagttaggaaacactctgtttgtaaagtctgcaagaggatattctgacctccttgaggccttcgttggaaacgggatttcttcatattctgctagacagaagaattctcagtgacttccttgtgttgtgtgtattcaactcacagatttgaacgatcctttacacagagcagacttgaaacactctttttgtggaatttgcaagtgcagatttcagccaatttgaggtcaatggtagaaaaggaaatatcttcgtataaagactagacagatgattctcagaaactcctttgtgatgtgtgcgttcaactcacagagtttaacccttctgttcatagagcagttaggaaacactctgtttgtaaagtctgcaagtggatattcagacctccttgaggccttcggtggaaaagggatttcttcatattctgctagacagaagaattctcagtaacttccttgtgttgtgtgtattcaactcacagagttgaacgatactttacacagagcagacttgaaacactcgttttgtggaatttgcaagtggagatttcagccgcgttgaggtcaatggtagaaaaggaaatatcttcgtataaaaactagacagaatcattctcagaaactgctctgcgatgtgtgcgttcaactctcagattttaacttttcttttcattcagcagtttggaaacactctgtttgtaaagtctgcacgtggatattttgaccacttagaggccttcgttggaaacgggtttttttcctgtaaggctaaacagaagaattctcagtaacttccttgtgttgtgtgtattcaactcacagatttgaacgatcctttacagagagcagacttgaaacactgtttttgtggaatttgcaagtggagatttcagccgctttgaggtcaatggtagaataggaaatatcttcctatagaaactagacagaatgattctcataaactcctttgtgatgtgtgcgttcaacacacagagtttaacctttctgttcatagagcagttaggaaacactctgtttgtaaagtctgtaagtggatattctgacatcttgtggccttcgttggaaacgggatttcttcatattctgctagacagaagaattctcagtaacttccttgtgttgtgtgtattcaactcactgagttgaacgatcctttacacagagcagacttgaaacactctttttgtggaatttgcaagtggagatttcagccgctttgaggtcaatggtagaaaaggaaatatcttcgtataaaaactagacagaatgattctcagaatctcctttgtgatgtgtgcgttcaactcacagagtttaacctttcttttcatagagcagttaggaaacactctgtttgtaaagtctgcaagtggatattcagtcctctttgaggccttcgttggaaacgggtttttttcatataaggctagacagaagaattcccagtaactttccttgtgatgtgtgtgttcaactcacagagttgaactttcatttacacagagcacatttgaaacactctttttgtggaatttgcaagtggagatttcaagcgctttgaggccaaaggcagaaaaggaaatatcttcgtataaaaactagacagaatcattctcagaaactgctctgcgatgtgtgcgttcaactctcagagtttaacttttcttttcattcagcagtgtggaaaaactctgtttgtaaagtctgcacgtggatattctgaccacttagaggccttcgttggaaacgggtttttttcctgtaaggctagacagaagaattctcagtaacttccttgtgttgtgtgtattcaactcacagagttgaactgatcctttacacagaacagtcttgaaacactctttttgtggaatttgcaattggagatttcagccgctttgaggtcaatggtagaataggaaatatcttcctatagaaactagacagaatgattctcagaaactcctttgtgatgtgtgcgttcaactcacagagtttaacctttcttttcatagagcagttaggaaacactctgtttgaaaagtctgcaagtggatattcagacctccttgaggccttcgttggaaacgggatttcttcatattatgctagacagaagaattctcagtaacttccttgtgttgtgtgtattcaactcacagagttgaacgatcctttccacagagcagacttgaaacactctttttgtggaatttgcaagtggagatttcagccgctttgaggtcaatggtagaaaaggaaatatcttcgtataaagactagacagagtgattctcagaaactcctttgtgatgtctgcgtttaactcacagagtttaaccattcttttcatagagcagttaggaaacactctgtttgtaaagtctgcaagtggatattcagacctccttgaggccttcgttggaaacgggatttcttcatattatgctagactgaagaattcccagtaacttccttgtgttgtgtgtgttcaactcacagagttgaactttcatttacacagagtagatttgaaacactctttttgtggaatttgcaagtggagatttcaagcgctttgaggctaaaggcagaaaaggaaatatcttcgtataaaaactagacagaatcattctcagaaactgctctgcgatgtgtgcgttcaactctcaagagtttaacttttcttttcattcagaagtttggaaacactctgtttgtaaagactgcacgtggatattttgaccacttagaggccttcgttggaaacgggtttttttcatgtaaggctagacagaagaattctcagtaacttcctcgtgttgtgtgtattcaactcacagagttgaacgatcctttacacagagcagacttgaaacactctttttgtggaatttgcaagtggagatttcagccgctttgatgtcaatggtacaaaaggaaatatcttcgtataaagactagacagaatgattttcagaaactcttttgtgatgtgtgcgttcaactcacagagtttaacctttctgttcatagagcagttaggaaacactctgtttgtaaagtctgcaagtggatattcagacctccttgagaccttcgttggaaacgggatttcttcatattctgctagacagaagaattctcagtaacttccttgtgttgtgtgtattcaactcacagagttgtacgatcctttacacagagcagacttgaaacactcttgttgtggaatttgcaagtggagatttcagccactttgaggtcaatgctagaaaaggaaatatcttcgtataaagactagacagaatgattctcagaaactcctttgtgatgtgtgggttcaactcacagagtttaacctttcttttcatagagcagttaggaaacactctgtttgtaaagtctgcaagtggatattcagacctctttgaggccttcgttggaaacgggtttttttcatataaggctagacagaagaattctcagtaacttccttgtgttgtgtgtattcaactgacagagttgaactttcatttagacagagcagatttgaagcactgtttttgtggaatttgcaagtggagatttcaagcgctttgaggccaaaggcagaaaacgaaatatcttcgtataaaaactagacagaatcattctcagaaactgctctgcgatgtgtgcgttcagctctcagagtttaacttttcttttcattcagcagtttggaaacactctgtttgtaaagtctgcacgtggatattttgaccacttagaggccttcgttggaaatgggtttttgtcatgtaaggctagacagaagaattcccagtaacttccttgtgttgtgtgtgttcaactcacagagttgaactttcatttacacagagcagatttgaaacactctttttgtggaatttgcaaatggagatttcacccgcgttgaggtcaatggtagaaaaggaaatatcttcgtttcaaaactagacagaatgattctcagaaactcctttgtgatgtgtgcgttcaactcacagagtttaacctttctgttcatagagcagttaggaaacactctgtttgtaaagtctgtaagtggatattctgacatcttgtggccttcgttggaaacgggatttcttcatattctgctagacagaagaattctcagtaacttccttgtgttgtgtgtattcaactcacagtgttgaacgatcctttacacagagcagacttgaaacactctttttgtggaatttgcaagtgtagatttcaagcgctttaaggtcaatggcagaaaaggaaatatcttcgtatcaaaactagacagaatgattctcataaactcctttgtgatgtgtgcgttcaactcacagagtttaacctttcttttcatagagcagttaggaaacactctgtttataaagtctgcaagtggatattcagacctccttgaggccttcgttggaaacgggatttcttcatattctgctagacagaagaattcccagtaacttccttgtgttgtgtgtgttcaactcgcagagttgaactttcatttacacagagcagatttgaaacactctttttgtggaatttgcaaatggagatttcaagcgctttgaggccaaaggcagaaaaggaaatatcttcgtataaaaactagacagaatcattctcagaaactgctctgcgatgtgtgtgttcaactctcacagtttaacttttcttttcattcagcagttaggaaacactctgtttgtaaagtctgcacgtggataatttgaccacttagaggccttcgttggaaacgggtttttttcatgtaaggctagacagaagaattcccagtaacttccttgtgttgtgtacattcaactcacagagttgaacgttcccttagacagagcagatttgaaacactctttttgtggaatttgcaagtggagatttcagccgctttgaggtcaatggtagaaaaggaaatatcttcgtataaaaactagacagaaatgattctcagaaaatcttttgtgatgtgtgcgttcaactcacagagtttaacttttcttctcatagagcaggtaggaaacactctgtttgtaaagtctgcaagtggatattcagacctctttgaggccttcgttggaaacgggatttcttcatattatgctagacagaataattctcagtaacttccttgtgctgtgtgtattcaactcacagagttgaaggatcctttacagagagcaggcttgaaacactctttttgtcgaatttgcaagtggagatttcagccgctttgaggtcaatggtagaataggaaatatcttcttatagaaactagacagaatgattctcataaactcctttgtgaagtgtgcgttcaactcacagagtttaacctttcttttcatagagcagttaggaaacactctgtttgtaaaggcggcaagtggatattcagacctccttgaggccttcgttggaaacaggatttcttcatattctgctagacagaagaattctcagtaacttccttgtgttgtgtgtattcaactgacagagttgaactttcatttagagagagcagatttgaaacactgtttttgtggaatttgcaagtggagatttcaagcgctttgtggccaaaggcagaaaaggaaatatcttcctataaaaactagacagaatcattctcagaaacagctctgcgatgtgtgcgttcaactctcagagtttaacttttcttttcattcagcagtttggaaacactctgtttgtaaagtctgcacgtggatattttgaccacttagaggccttcgttgcaaacgggtttttttcctgtaaggctagacagaagaattcccagtaacttccttgtgttgtgtgcattcaactcacagagttgaacgtccccttagacatagcagatttgaaacactctatttctgcaatttgcaagtgtagttttcaagctctttaaggtcaacggcagaaaaggaaatatcttcgtttcaaaactagacagaatcattcccacaaactgcgttgtgatgtgttcgttcaacttacagagtttaacctttctgttcatagagcagttaggaaacactctgtttgtaaagtctgaaagtggatattctgacatcttgtggccttcgttggaaacgggatttcttcatattctgctagacagaagaattctcagtaacttccttgtgttgtgtgtattcaactcacagagttgaatgatcctttacacagaacagtcttgaaacactctttttgtggaatttgcaagtggagatttctgccgctttgaggtcaatggtagaataggaaatatcttcctatagaaactagacagaatgattctcataaactcctttgtgatgtgtgcgttcaactcacaaagtttaacttttcttttcatagagcagttaggaaacactctgtttgtaaagtctgcaagtggatattcagaactctttgaggccttcgttggaaacgggatttcttcatattatgctagacagaagaattctcagtaacttccttgtgttgtgtgtattcaactgacagagttgaactttcatttagagagagcggatttgaaacactgtttttgtggaatttgcaagtggagatttcaagcgctttggggccaaaggcagaaaaggaaatatcttcgtataaaaactagacagaatcattctcagaaactgctgcgtgatgtgtgcgttcaactctcagagtttaacttttcttttcattcagcggtttggaaacactctgtttgtaaagtctgcacgtggaaattttgaccacttagaggccttcgtggaaacgggtttttttcatgtaaggctagacagaagaattcccagtaacttccttgtgttgtgtgcattcaactcacagagttgaacgttcccttagacagagcagatttgaaacactctatttgtgcaatttgcaagtgtagatttcaagcgctttaaggtcaatggcagaaaaggaaatatcgtcgtttcaaaattagacagaatcattcccacaaactgcgttgtgatgtgttcgttcaactcacagagtttaacctttctgttcatagagcagtgaggaaacactctgtttgtaaagtctgtaagtggatattctgacatcttgtggccttcgttggaaacgggatttcttcatattctgctagacagaagaattctcagtaacttctttgtgttgtgtgtattcaactcacagagttgaacgatcctttacacagagcagacttgaaacactctttttgtggaatttgcaagtggagatttcagccgctttgaggtcaatggtagaataggaaatatcttcatatagaaactagacagaatgtttctcagaaactcctttgtgatgtgtgcgttgaactcacagagtttaacctttcttttcatagagcagttaggaaacactctgtttgtaaagtctgcaagtggatattcagacatcgttgaggctttcgttggaaacgggatttcttcatattctgatagaaagaagaattctcagtaacttccttgtgttgtgtgtattcaactcacagagttgaatgatcctttacacagaacagtcttgaaacactctttttgtggaatttgcaagtggagatttcagccgctttgaggtcaatggtagaataggaaatatcttccaatagaaactagacagaatcattctcagaaactgctctgcgatgtgtgcgttcaactctcagagtttaacttttcttttcattcagcagtttggaaacactctgtttgtaaagtctgcacgtggatattttgaccacttagaggccttcgttggaaacggatttttttcctgtaaggctagacagaagaattcccagtaacttccttgcgttgtgtacattcaactcacagagttgaacgttcccttagacagagcagatttgaaacactctttttgtgcaattggcaagtggagatttcaagcgctttaaggtcaatggcagaaaaggaaatatcttcgtttcaaaactagacagaatcattcccacaaactgcgttgtgatgtgttcgttcaactcacagagtttaacttttcttttcatagagcagttaggaaacagtctgtttgtcaattctgtaagtggatattctgacatcttgtggccttcgttggaaacgggatttcttcatattctgctagacagaagaattctcagtaacttccttgtgttgtgtgtattcaactcacagagttgaatgatcctttacacagatcagtcttgaaacactctttttgtggaatttgcaagtggagatttcagccgctttgaggtcaatggtagaataggaaatatcttcctatagaaactagacagaatgattctcagaaactcctttgtgatgtgtgcgttcaactcacagagtttaacctttcttttcatagagcagttaggaaacacactgtttgtaaagtctgcaagtggatattcatacctctttgaggccttcgttgaaaacgggatttcttcatattctgctagagagaagaattctcagtaacttccttgtgttgtgtgtattcaactcacagagttgaacgatcctttacacagagcagacttgaaacactctttttgtggaatttgcaagtggagatttcaagcgctttgaggccaaaggcagaaaaggaaatatcttcgtacaaaaactagacagaatcatactcagaaactgctctgcaatgtgtgcgttcaactctcagagtttaacttttcttttcattcagcagtttggaaacactctgtttgtaaagtctgcacgtggatattttgaccacttagtggcctttgttggaaacggttttttttcctgtaaggctagacagaagaattcccagtaacttccttgtgttgtgtacattcaactcacagagttgaacgttcccttagacagagcagatttgaaacactctttttgtgcaattggcaaatggagatttcaagcgctttaaggtcaatggcagaaaaggaaatatcgtcgtttcaaaactagacagaatcattcccacaaactgcgttgtgatgtgttcgttcaactcacagagtttaacctttcttttcatagagcagttaggaaacagtctgtttgtcaattctgtaagtggatattctgacatcttgtggccttcgttggaaacgggatttcttcatattccgctagacagaagaattctcagtaacttccttgtgttgtgtgtattcaactcacagagttgaacgatcctttacacagagcagacttgaagcaccctttttgtggaatttgcaagtggagatttcagccgctttgaggtcaatggtagaaaaagaaatatcttcgtataaaaactagacagaatgattctcagaaactcctttgtgatgcgtgcgttcaactcacagagttcaacctttcttttcatagagcagttgggaaacactctgtttgtaaagtctgcaagtggatattcagacttctttgaggccttcgttggaagcgggatttcttcatattctgctagacagaagaattcccagtaacttccttgtgttgtgtgtgttcaactcacagagttgaactttcatttacacagagcagatttgaaacactctttttgtggaatttgcaagtggagattttaagggctttgaggccaaaggcagaaaaggaaatatcttcgtataaaaactagacagaatcattctcagaaactgctctgcgatgtgtgcgttcaactctcagagtttaactcttcttttcattcagctgtttggaaacactctgtttgtaaagtctgcacgtggataatttgactacttagaggccttcgttggaaacgggtttttttcctgtaaggctagacagaagaattcccagtaacttccttgtgttgtgtgcattcaactcacagagttgaacgttcccttagacagagcagattcgaaacactctatttgtgcaatttgcaagtgtagatttcaagcgctttaaggtcaatagcagaaaaggaaatatcttcgtttgaaaactagacagaatcattcccacaaactgcgttgtgatgtgtgcgttcaactcacagagtttaacttttcttttcatagagcagttaggaaacactctgtttgtaaagtctgcaagtggatattcagacctctttgaggccttcgttggaaacgggatttcttcatattctgctagacagaagaattctcagaaacttccttgtgttgtgtgtattcaactcacagagttgaacgatcctttacacagagcagacttgaaacactctttttgtggaaattgcaagtggagatttcaggcgctttgaggtcaatggtagaaaaggaaatatcttcgtataaaaactagacagaatgattctcagaaaatcttttgtgatgtgtgcgttcaactcacagagtttaacttttcttctcatggagcagttaggaaacactctgtttgtaaagtctgcaagtggatattcagacccctttgaggccttcgttggaaacgggatttcttcatattctgctagacagaagaattcccagtaacttccttgtgttgtgtgtattcaactcacagagttgaacgatcctttacacagagaggacttgaaacactctttttgaggaatttgcaagtggagatttcagccgctttgaggtcaatggtagaaaaggaaatatcttcgtataaaaactagacagaatgattctcagaaacttctttgtgatgtgtgcgttcaactcacagagtttaacctttcttttcatagagcagttaggaaacactctgtttgttaagtctgcacgtggatacttggacttctttgaggccttcgttggaaacgggtttttttcatgtaaggctggacagaagaattcccagtaacttccttgtgttgtgtacattcaactcacagagttgaacgttcccttagacagagcagatttgaaacactctttttgtgcaattggcaaaaggagatttcaagcgctttacgttcaatggcagaaaaggaaatatcttcgtttcaaaactagacagaatcattcccacaaactgcgttgtgatgtgttcgttcaactcacagagtttaacctttcttttcatagagcagttaggaaacagtctgtttgtaaattctgtaagtggatattctgacatcatgtggccttcgttggaaacgggatttcttcatattctgctagacagaagaattctcagaaacttcgttgtgttgtgtgttttcaactcacagagttcaacgatcctttacacagagcagacttgaaacactctttttgtggaatttgcaagtggagatttcagccattttgaggtcaacgttagaaaaggaaatatcttcgtataaaaactacacagaatgattctcagaaactcctttgtgatgtgtgcgttcaactcacagagttcaacctttcttttcatagagcagttgggaaacactctgtttgtaaagtctgcaagtggatattcagacttctttgaggccttcgttggaaacgggatttcttcatattctgctagacagaagaattcccagtaacttccttgtgttgtgtgtgttcaactcacagagttgaactttcatttacacagagcagatttgaaacactctttttgtggaatttgcaagtggagatttcaagcgctttgaggccaaaggcagaaaaggaaatatcttcgtatcaaaactagacagaatcattctcagaaactgctctgcgatgtgtgcgttcaactctcagaagtttaacttttcttttcattcagcagtttggaaacactctgtttgtaaagtctgcacgtggataacttgaccacttagaggccttcgttggaaacgggtttttttcatgtaaggctagacagaagttttcccagtaacttccttgtgttgtgtacattcaactcacagagttgaacgttcccttagacagagcagatttgaaacactctttttgtgcaattggcaaatggagatttcaagcgctttaaggtcaatggcagaaaaggaaatatcttcgtttcaaaactagacagaatcattcccacaaactgcgttctgatgtgttcgttcaactcacagagtttaacctttctgttcatagagcagttaggaaacactctgtttgtaaagtctgtaagtggatattctgacatcttgtggccttcgttggaaacgggatttcttcatattctgctagacagaagaattctcagtaacttccttgtgttgtgtgtattcaactcacagagttgaacgatcgtttacacagagcagacttgaaacattctttttctggaatttgcaagtggagatttcagccgctttgaggtcaatggtagaataggaaatatcttcctatagaaactagacagaaatgattctcagaaactcctttgtgatgtgtgcgttcaactcacagagtttaacctttcttttcatagagcagttaggaaacactctgtttgtaaagtctccaagtggatattcagacctctttgaggccttcgttggaaacgggtttttttcatataaggctagacagaagaattctcagtaacttccttgtgttgtgtgtattcaactgacagagttgaacgatcctttacacagagcagacttgaaacactctttttgtggaatttgcaaggggagatttcaagcgctttggggccaaaggcagaaaaggaaatatcttcgtataaaaactagacagaatcattctcagaaactgctctgcgatgtgtgcgttcaactctcagagtttaaattttcttttcattcagcagtttggaaacactctgtttgtaaagtctgcacgtggatattttgaccacttagaagccttcgttggaaacgggtttctttcctgtaaggctagacagaagaattcccagtaacttccttgtgttgtgtacattcaactcacagagttgaacgttcccttagacagagcagatttgaaacactctttttgtgcaattggcaaatggagatttcaagcgctttaagttcaatggcagaaaaggaaatatcttcgtttcaaaactagacagaatcattcccacaaactgcgttgtgatgtgttcgttcaactcacagagtttaacctttctgttcatagagcagttaggaaacactctgtttgtaaagtctgtaagtggatattctgacatcttgtggccttcgttggaaacgggatttcttcatattatgctagacagaagaattctcagtaacttccttgtgttgtgtgtattcaactcacagagttgaacgatcctttacacagagcagacttgaaacactctttttgtggaattggcaagtggagatttcagccgctttgaggtcaatggtagaataggaaatatcttcctatagaaactagacagaatgattctcagaaactcctttgtgatgtgtgcgttcaactcacagagtttaacctttcttttcatagagcagttaggaaacactctgtttgtaaagtctgcaagtggatattcagacttctttgaggccttcgttggaaacgggtttttttcatataaggctagacagaagaattcccagtaacttccttgagttgtgtgtattcaactcacagagttgaactttcatttacacagagcagatttgaaacactctttttgtggaatttgcaaatggagatttcaagtcctttcaggccaaaggcagaaaaggaaatatcttcgtatgaaaactagacagaatcattctcagaaactgctctgcgatgtgtgcgttcaactctccgagtttaacttttcttttcattcagcagtttggaaacactctgtttgtaaagtctgcacgtggataatttgaccacttagaggccttcgttggaaacggtttttttttcatgtaaggctagacagaagaattcacagtaacttccttgtgttgtgtacattcaactcacagagttgaacgttcccttagacagagcagatttgaaacactctttttgtgcaattggcaagtggagatttcaagcgctttaaggtcaatggcagaaaaggaaatatcttcctttcaaaactagacagaatcattcccacaaactgcgttgtgatgtgttcgttcaactcacagagtttaacctttcttttcatagagcagttaggaaacagtctgtttgtaaattctgtaagtggatattctgacatcttgtggccttcgttggaaatgggatttcttcatattctgctagacagaagaattctcagaaacttccttgtgttgtgtgtcttcaactcacagagttgaacgatgctttacacagagtagacttgaaacactctttttgtggaatttgcaagtggagatttcaggcgctttgaggtcaatggtagaaaaggaaatatcttcgtataaaaactagacagaatgattctcataaactcctttgtgatgtgtgcgttcaactcacagagtttaacttttcttttcatagagcagttaggaaacactctgtttgtaaagtctgcaagtggatattcagacctctttgaggccttctttggaaacgggatttcttcatattatgctagacagaagaattctcagtaacttccttgtgttgtgtgtattcaactcacagagttgaatgatcctttacacagaggagacttgaaacactctttttgtggaatttgcaagtggagatttcagccgctttgaggtcaatagtagaaaaggaaatatcttcgtagaaaaactagacagaatgattctcagaaactcctttgtgatgtgtgtgttcaactcacagagtttaacctttcttttcatagagcagttaggaaacactctgcttgtaaagtctgcaagtggatattcagacctcgttgaggccttcgttggaaacgggatttcttcatattctgctagacagaagaattctcagtaacttccttgtgttgtgtttatgcaactcacagagttgaatgatcctttacacagagcagacttgaaacactctttttgtggaatttgcaagtggagatttcagccgctttgtggtcaatggtagaaaaggaaatatcttcgtataaagactagacagaatcattctcagaaactgctctgcgatgtgtgcgttcaactctcagtgtttaacttttcttttcattcagcagtttggaaacactctgtttgtaaagtctgcacgtggataatttgaccacttagagattttcgttggaaacgggtttttttcatgtaaggctagacagaagaattcccagtaacttccttgtgttgtgtacattcaactcacagagttgaacgttcccttagacagagcagatttgaaacactctttttgggcaattggcaagtggagattacaagcgctttaaggtcaatggcagaaaaggaaatatcttcgtttcaaaactagacagaatcattcccacaaactgcgttgtgatgtgttcgttcaactcacagagtttaacctttcttttcatagagcagttaggaaacactctgttggtaaattctgtaagtggatattctgacatcttgtggccttcgttggaaacgggatttctaaatattctgctagacagaagaattctcagtaacttccttgtgttgtgtttattcaacgcacagagttgaatgatcctttacgcagagcagacttgaaacactctttttgtggaatttgcaagtggagatttcagccgctttgaggtcaatggtagaaaagtaaatatcttcgtataaagactagacagaatgattctcagaaaatcttttgtgatgtgtgcgttcaactcacagagtttaacttttcttctcatagagcagttaggaaacactctgtttgtaaagtctgcaagtggatattcagacctctttgaggccttcgttggaaacgggatttcttcatattctgctagacagaagaattctcactaacttccttatgttgtgtgtattcaactcacagagttgaaggatgctttacagagagcaggcttgaaacactctttttgtcggatttgcaagtggagatttcagccgctttgaggtgaatggtagaataggaaatatcttcttatagaaactagacagaatcattctcagaaactcctttgagatgtgtgcgttcaactctcagagtttaacttttcttttcattcagcagtttggaaacactctgtttgtaaagtctgcacgtggatattttgaccacttagaggccttcgttggaaacgggtttctttcctgtaaggctagacagaagaattcccagtaacttccttgtgttgtgtgcattcaactcacagagttgaacgttcccttagacagagcagatttgaaacactctatttgtccaatttgcaagtgtagatttcaagcgctttaaggtcaacggcagaaaaggaaatatcttcgtttcaaaactagacagaatcattcccacaaactgcgttgtgatgtgttcgttcaactcacagagtttaacctttcttttcatagagcacttaggaaacagtctgtttgtaaattctgtaagtggatattctgacatcttgtggccttcgttggaaacgggatttcttcatattctgctagacagaagaattctcagtaacttccttgtgttgtgtgtattcaactcacagagttgaacgatcctttacacagagcagacttgtaacactctttttctggaatttgcaagtggagatttcagccgctttgaagtcaaaggtagaaaaggaaatatcttcctataaaaactagacagaatgattctcagaaacttctttgtgatgtgtgcgttcaactcacagagtttaacctttctattcatagagcagttaggaaacactctgtttgtaaactctgcaagtggatattcagacctctttgaggccttcgatggaaacgggatttctccatactatgctagacagaagaattctcagtaatttccttgtgttgtgtgtattcaactcacagagttgaacgatcctttacacagagcagacttgaaacactctttttgtggaatttgcaagtggagatttcagccgctttgaggtcaatggtagaaaaggaaatatcttcgtataaaaactagacagaatcattctcagaaactgctctgggatgtgtgcgttcaactctcagagtttaacttttcttttcattcagcagtgtggaaacactctgtttgtaaagtctgcacgtggatattttgaccacttagaggccttcgttggaaacgggtttttttcctgtaaggctagacagaagaattcccagtaacttccttgtgttgtgtacattcaactcacagagttgaacgttaccttagacagagcagatttgaaacactctttttgtgcaattggcaaatggagatttcaagcgctttaaggtcaatggcagaaaaggaaatatcttcgtttcaaaactagacagaatcattcccacaaactgcgttgtgatgtgttcgttcaactcacagagtttaacctttctgttcatagagcagttaggaaacactctgtttgtaaagtctgtaagtggatattctgacatcttgtggccttcgttggaaacgggatttcttcgtattctgctagacagaagaattctcagtaaattccttgtgttgtgtgtattcaactcacagagttgaacgatcctttacacagagcggacttgaaacacactttttgtggaatttgcaagtggagatttcagccgcgttgaggtcaatggtagaaaaggaaatatcttcgtataaaaactagacagaatgattctcagaaactcctttgtgatgtgtgcgtgcaactcacagagtttaacttttcttttcatagagcagttaggaaacactctgtttgtaaagtctgcaagtggatattcagacctctttgaggccttcgttggaaacgggatttcttcatattatgctagacagaagaattcccagtaacttccttgtgttgtgtgtgttcaactcacagagctgaactttcatttacacagagcagatttgaaacactctttttgtggaatttgcaaatggagatttcaagcgctttgaggccaaaggcagaaaaggaaatatcttcgtttcaaaactagacggaatcattctcagaaactgctctgcgatgtgtgcgttcaactctcagagtttaacttctcttttcattcagtagtttggaaacactctgtttgtaaagtctgcacgtggataacttgaccacttagaggccttcgttggaaacgggtttttttcatgtaaggctagacagaagaattcccagtaacttccttgtgttgtgtacattcaactcacagagttgaacgttcccttagacagagcagatttgaaaaactctttttgtgcaattggcaagtggagatttcaagcgctttaaggtcaatggcagaaaaggaaatatcttcgtttcaaaactagacagaatcattcccacaaactgcgttgtgatgtgttcgttcaactcacagagtttaacctttcttttcatagagcagttaggaaatagtctgtttgtaaattctgtaagtggatattctgacatcttgtggccttcgttggaaacgggatttcttcatattctgctagacagaagaattctcagtaacttccttgtgttgtgtgtattcaactcacagggttgaacgatcctttatacagagcagacttgaaacactctttttgtgggacttgcaagtggagatttcagccgctttgaggtcaataatagtaaaggaaatatcttcgtagaaaaactagacagaatgattctcagaaactcctttgtgatgtgtgcgttcaactcacagagtttaacctttcttttcatagagcagttaggaaacactctgtttgtaaagtctgcaagtggatattcagacctccttgaggccttcgttggaaatgggatttcttcatattatgctagacagaagaattctcagtaacttccttgtgttgtgtgtattcaactcacagagttgaacgatcctttacacagagcatacttgaaacactcttgttgtggagtttgcaagtggagatttcagccgctttgaggtcaatggtagaataggaaacatcttcctatagaaactagacagaatcattctcagaaactgctctgcgatgtgtgcgttcaactctcagagtttaacttttcttttcattcagcagtttggaaacactctctttgtaaagtctgcacgtggatattttgaccatttagaggccttcgttggaaacgggtttttttcctgtaaggctagagagaagaattcccagtaacttccttgcgttgtgtacattcaactcacagagttgaacgttcccttagacagagcagatttgaaacactctttttgtgcaattggcaagtggagatttcaagcgctttaaggtcaatggcagaaaaggaaatatcttcgtttcaaaactagacagaatcattcccacaaactgcgttgtgatgtgttcgttcaactcacagagtttaacctttcttttcatagagcagttaggaaacagtctgtttgaaaattctgtaagtggatattctgacatcttgtggccttcattggaaacgggatttcttcatattctgctagacagaagaattctcagtaacttccttgtgttgtgtgtattcaactcacagaattgaacgatcctttacacagagcagacttgaaacattctttttgtggaatttgcaagtggagatttcagccgctttgaggtcaatggtagaataggaaatatcttcctatagaaaatagacagaatgattctcagaaaatcttttgtgatgtgtgcgttcaactcacagagtttaacttttcttctcatagagcagttaggaaacactctgtttgtatagtctgcaagtggatattcagacctctttgaggccttcgttggaaacgggatttcttcatattatgctagacagaagaattctcggtaacttccttgtgttgtgtgtattcaactgacagagttgaactttcatttagagagagcagatttgaaacactgtttttgtggaatatgcaagtggagatttcaagcgctttggggccaagggcagaaaaggaaatatcttcgtttaaaaactagacagaatcattctcagaaactgctgcgtgatgtgtgcgttcaacgctcagagtttaactattcttttcattcagcggtttggaaacactctgtttgtaaagtctgcacgtggatattttgaccacttagacgccttcgttggaaacgggtttttttcatgtaaggctagacagaagaattcccagtaacttccttgtgttgtgtacattcaactcacagagttgaacgttcccttagacagagcagatttgaaacactctttttgtgcaattggcaagtggagatttcaagcgatttaaggtcaatggcagaaaaggaaatatcttcgtttcaaaactagacagaatcattcccacaaactgcgttgtgatgtgttcgttcaactcacagagtttaacctttctgttcatagagcagttaggaaacactctgtttgaaaagtctgcaagtggatattcagacctccttgaggccttcgttggaaacgggatttcttcatattctgctagaccgaagaattctcagaatcttccttgtgttgtgtgtattcaactcacacagttgaacgatggtttacacagagcagatttgaaacactctttttgtggaatttgcaagtggagatttcagccgcgttgaggtcaatggtagaaaaggaaatatcttcgtataaaaactagacacaacgattctcagaaacttctttgtgatgtgtgcgttcaactcacagagtttaacctttcttttcatagagcagttaggaaacactctgtttgtaaactctgcaagtggatattcagacctgtttgaggccttcgttggaaacgggatttcttcatactatgctagacagaagaattcccagtaacttccttgtgttgtgtgtgttcaactcacagagttcaactttcatttacacagagcagatttgaaacactctttttgtggaatttgcaagtggagatttcaagcgctttgaggccaaaggcagaaaaggaaataccttcgtataaaaactagacagaatcattctcagaaactgctctgcgatgtgtgcgttcaactctcagaagtttaacttttcttttcattcagcagtttggaaacactctgtttgtaaagtctgcacgtggataacttgaccacttagaggccttcgttggaaacgggtttttttcctgtaaggctagacagaagaattcccagtaacttccttgtgttgtgtacattcaactcacagagttgaacgttcccttagacagagcagatttgaaacactctttttgtgcaattggcaagtggagatttcaagcgctttgaggtcaatggcagaaaaggaaatatcttcgtttcaaaactagacagaatcattcccacaaactgcgttgtgatgtgttcgttcatctcacagagtttaacctttcttttcgtagagcagttaggaaacagtctgtttgtaaattctgtaagtggatattctgacatcttgtggccttcgttggaaatgggatttcttcatattctgctagacagaagaattctcagaatcttccttgtgttgtgtgtattcaactcacagagttgaacgatggattacacagagcagatttgaaacactctttttgtggaatttgcaagtggagatttcagccgctttgaggtcaatggtagaaaaggaaatatcttcgtataaaaactagacagaatgattctcagaaactcctttgtgatgtgtgcgttcaactcacagagtttaacctttcttttcatagagcagttaggaaacactgtgtttttatagtctgcaagtggatattcagacatctttgaggccttcgttggaaacgggatttcttcatattctgctatacagaagaattctcagaaacttcctagtgttgtgtgttttcaactcacagagttgaacgatgctttacacagagtagacttgaaacactctttttgtgtaatttgcaagtggagatttcagccgctttgaggtcaatggtagaaaaggaaatatcttcgtataaaaactagacagaatgattgtcagaaactcctttgtgatgtgtgcgttcaactcacagagtttaacctttcttttcatagagcagttaggaaacactctgtttgtaaagtctgcaagtggatattcagacatctttgaggctttcgttggaaacgggatttcttcatattctgctatacagaagaattcccagtaacttccttgtgttgtgtgtgttcaactcacagagttgaactttcatttacacagagcagatttgaaacactctttttgtggaatttgcaagtggagatttcaagcgctttgaggtcaatggcagaaaaggaaatatcttcgtttcaatctagacagaatcattcccacaaactgcgttgtgatgtgttcgttcaactcacagagttttacctttctgttcatagagcagttaggaaacactctgtttgtaaagtctgtaagtggatattctgacatcttgtggccttcgttggaaaagggatttcttcatattctgctagacagaagatttctcagtaacttccttgtgttgtgtgtattcaactcacagagttgaacgatcctttacacagagcagacttggaacactctttttgtggaatttccaagtggagatttcagccgcgttgaggtcaatggtagaaaaggtaatatcttcgtataaaaactagacagaatgattctcagaaactcctttgtgatgtgtgtgttcacctcacagagtttaacctttcttttcatagagcagttagtaaacactctgtttataaagtctgcaagtggatattcagacccctttggggccttcgttggaaacgggatttcttcatattatgctagacagaagaattcccagtaacttccttgtgttgtgtgtgttcaactcacagagttgaactttcatttacacagagcagatttgaaacactctttttgtggaatttgcaagtggagatttcaagcgctttgaggccaaagcagaaaaggaaatatcttcgtttcaaaactagacagaatcattctcagaaactgctctgcgatgtgtgcgttcaactctcagagtttaacttttcttttcattcagcagtttggaaacactctctttgtaaagtctgcacgtggatattttgaccacttagaggccttcgttggaaacgggtttttttcctgtaaggctagacagaagaattcccagtaacttccttgtgttgtgtacattcaactcacagagttgaacgttcccttagacagagcagatttgaaacactctttttgtgcaattggcaagtggtgatttcagccgctttgaggtcaatggtataaaaggaaatatcttcgtataaaaactagacagaatgattctcagaaacttcattgtgatgtgtgcgttcaactcacagagtttaacctttcttttcatagagcagtttggaaacagtctgtttgtaaattctgtaagtggatattctgacatcttgtggccttcgttggaaacgggatttcttcatattctgctagacagaagaattctcagtaacttccttgtgttgtgtgtattcaactcacagagttgaacgatcctttacacagagcagacttgaaacactctttttgtggaatttgcaagtggagatttcagccgctttgaggtcaatagtagaaaaggaaatatcttcgtagaaacactagacagaatgattctcagaaacttctttgtgatgtgtgcgttcaactcacagagtttaacctttcttttcatagagcagttaggaaacactctgtttgtaaagtctgcaagtggatattcagacctctttgaggccttcgttggaaacgggatttcttcatactatgctagtcagaagaattctcagtaacttccttgtgttgtgtgtattcaactcacagagttgaactttcatttacacagagcagatttgaaactctctttttgtggaagttgcaagtggagatttcaagcgctttgaggccaaaggcagaaaaggaaatatcttcgtttcaaaactagacagaatcattctcagaaactgctgcgtgatgtgtgcgttcaactctcagagtttaacttttcttttcattcagcggtttggaaacactctgtttgtaaagtctgcacatggatattttgaccacttagaggccttcgttggaaacgggttttcttcatgtaaggctagacagaagaattcccagtaacttccttgtgttgtgcgcattcaactcacagagttgaacgttcccttagacagagcagatttgaaacactctatttgtgcaatttccaagtgtagatttcaagcgctttaaggtcaacggcagaaaaggaaatatcttcgtttcaaaactagacagaatcattcccacaaactgcgttgtgatgtgttcgtacaactcacagaagtttaacctttctgttcatagagcagttaggaaacactctgtttgtaaagtctgtaagtggatattcagacatcttgtggccttcgttggaaacgggatttcttcatattctgctagacagaagaattctcagtaacttccttgtgttgtgtgtattcaactcacagagttgaacgatcctttacacagagcagacttgaaacactctttttgtggaatttgcaagtggagatatcagccgctttgaggtcaatggtagaaaaggaaatatcttcgtataaaaactagacagagaatgattctcagaaactcctttgtgatgtgtgcgttcagctcacagagtttaacctttctttttatagagcagttcggaaacactctgtttgtaaagtctgcaagtggatattcagacctctttgaggccttcgttggaaacgggatttcttcatattctgctagacagaataattctcagtaacttccttgtgttgtgtgtattcaactcacagagttgaaggatcctttagagagagcaggcttgaaacactctttttgtcgaatttgcaagtggagatttcagccactttgaggtcaatggtagaataggaaatatcttcttatagaacctagacaaaatgattctcagaaacttctttgtgatgtgtgcgttcaactcacagtagttaaaactttcttttcatagagcagttaggaaacactctgtttgtaaagactgcacgtggatattcagacctctttgaggccttcgttggaaacgggtttttttcctgtaaggctagacagaagaattcccagtaactttccttgtgttgtgtacattcaactcacagagttgaacgttcccttagacagagcagatttgaaacactctttttgtgcaattggcaaatggagatttcaagcgctttaaggtcaatggcagaaaaggaaatatcttcgtttccaaactagacagaatcattcccacaaactgcgttgtgatgtgttcgttcaactcacagagtttaacctttctgttcatagagcagttaggaaacactctgtttgtaaagtctgaaagtggatattctgacatcttgtggccttcgttggaaacgggatttcttcatattctgctagacaaaagaattctcagtaactttccttgtgttgtgtgtattcaactcacagagttgaccgatcctttacacagagcagacttgtaacactctttttgtggaatttgcaagtggagatttcagccgctttgaagtcaaaggtagaaaagggaatatcttcctataaaaactagacagaatgattctcagaaactcctttgtgatgtgtgcgttcaacacacagagtttaacctttcttttcatagagcagttaggaaacactctgtttgtaaagtctgcaagtggatattcagacctctttgaggctttcgttggaaacgggatttcttcatattctgctagacagaagaattcccagtaacttccttgtgttgtgtgtgttcaactcacagagttgaactttcatttacacagagcagatttgaaacactctttttgtggaatttgcaagtggagatttcaagggctttgaggccaaaggcagaaaaggaaatgtcttcgtttcaaaactagacagaatgattctcagaaactggtttgtgatgtgtgcgttcaactcacagagtttaacctttcttttcatagagcagttaggaaacactctgtttgtaaagtctgcatgtggatatttggacttctctgaggtcttcgttggaaacgggtttttttcatgtaaggctagacagaagaattctcagtaacttccttgtgttgtgtgtattcaactcacagagttgaacgatcctttacacagagcagacttgaaacactctttttatggaatttgcaagtttagatttcagccgctttgaggtcaatggtagaaaaggaaatatcttcgtataaaaactagacagaatgattctcagaaactcctttgtgatgtgtgcattcaactcacagagtttaacctttcttttcatagagcagttaggaaacactctgtttgtaaagtctgcaattggatattcagacctccttgaggccttcgttggaaaagggatttcttcatattatgctagacagaagaattctcagtaacttccttgtgttgtgtgtattcaactcacagagttgaacgatcctttacacagagcagacttgaaacactctttttgtggaatttgcaagtggagatttcagccgctttgaggtcaatggtagaataagaaatatcttcctatagaaactagacagaaatgattctcagaaactcctttgtgatgtgtgcgttctactcacagagtttaacctttcttttcatagagcagttaggaaacactctgtttgtaaagtctgcaagtggatattcagacatctttgagactttcgttggaaacgggatttcatcatattctgctagacagaagaattctcagtaacttccttgtgttgtgtgtattcaactcacagagttggacgatcctttacacagagcagacttgaaacactctttttgtggcatttgcaagtggagatttcagccgctttgagttcaatggtagaataggaaatatcttcctatagaaactagacagaatcattctcagaaactgctctgcgatgtgtgcgttcaactctcagagtttaacttttcttttcattcagcagtttggaaacactctgtttgtaatgtctgcacgtggatattttgaccacttagaggccgtcgttgcaaacgggtttttttcctgtaaggctagacagaagaattcccagtaacttccttgtgttgtgtacattcaactcacagagttgaacgttcccttagacagagcagatttgaaacactctttttgtgcaattggcaagtggagatttcaagcgctttgaggtcaatggcagaaaaggaaatatcttcctttcaaaactagacagaaatcattcccacaaactgcgttgtgatgtgttcgttcaactcacagaagtttaacctttcttttcatagagcagttaggaaacagtctgtttgtaaattctgtaagtggatattctgacatcttgtggccttcgttggaaacgggatttcttcatattctgctagacagaagaattctcagtaacttccttgtgttgtgtgtattcaactcacagagttgaacgatcctttacacagaacagacttgtaacactctttttgtggaatttgcaagtggagatttcagccactttgaagtcaaaggtagaaaaggaattaacttcctataaaaactagacagaatgattctcagaaacttctttgtgatgtgtgtgttcaactcacagagtttaacctttcttttcatagagcagttaggaaacactctgtttgtaaactctgcaagtggatattcagacctctatgaggccttcgttggaaacgggtttttttcatataaggctagacagaaggattcccagtaacttccttgtgttgtgtgtgttcaactcacagagttgaactttcatttacaaagagcatatttgaaacactctttttgtggaatttgcaagtggagatttcaagcgctttgaggccaaaggcagaaaaggaaatatcttcgtataaaaactagacagaatcattctcagaaactgctctgcgatgtgtgcgttcaactctcagagtttaacttttcttttcattcagcagtttggaaacactctgtttgtaaagtctgcacgtggataatttgaccacttagaggccttccttggaaacgggtttttttcatgtaaggctagacagaagaattcccaggaacttccttgtgttgcgtacattcaactcacacatttgaacgttcccttagacagagtagatttgaaacactctttttgtgcaattggcaagtggtgatttcagccgctttgaggtcaatggtagaaaaggaaatatcttcgtataaaaactagacagaatcattcccacaaactgcgttgtgacgtgttcgttcaactcacagagtttaacctttcttttcatagagcagttaggaaacagtctgtttgtaaattctgtaagaggatattctgacatcttgtggccttcgttggaaacgggatttcttcatattctgctagacagaagaattctcagtaacttccttgtgttgtgtgtattcaactcacagagttgaacgatcctttacacagagcggacttgaaacacacgttttgtggaatttgcaagtggagatttcagccgcgttgaggtcaatggtagaaaaggaaatatcttcgtataaaagctagacagaatgattctcagaaactcctttgtgatgtgtgcgttcaactaacagagtttaacctttcttttcatagagcagttaggaaacactctgtttgtgaagtctgcaagtggatattcagacctctttgaggccttcgttggaaacgggtttttttcatataaggctagacagaagaattcccagtaacttccttgtgttgtgtgtgttcaactcacagagttgaactttcatttacccagagcagatttgaaacactctttttgtggaatttgcaagtggagaattcaagcgctttgaggccaaaggcagaaaaggaaatatcttcgtataaaaactagacagaatcattctcagaaactgctctgcgatgtgtgcgttcaactctcagagtttaacttttcttttcattcagcagtttggaaacactctgtttgtaaagtctgcacgtggataatttgaccacgtagaggccttcgatggaaacgggtttttttcatgtaaggctagacagaagaattctcattaacttccttgtgttgtgtgtattcaactcacacagttgaacgatcctttacacagagtagacttgtaacactctttttgtggaatttgcaagtggagatttcagccgctttgaagtcaaaggtagaaaaggaaatatcttcctataaaaactagacagaatgattctcagaaacttcattgtgatgtgtgcgttcaactcacagagtttaacctttcttttcatagagcagttaggaaacactctgtttgtaaactctgcaagtggatattcagacctctttgaggccttcgttggaaacggggtttcttcatactgtgctagacagaagaattctcagtaacttccttgtgttgtgtgtattcaactcacagagttgaacgatcctttacacagagcggagttgaaacactctttttgtggaatttgcaagtggagatttcagccgcgttgaggtcaatggtagaaaaggaaatatcttcgtataaaaactagacagaatgattctcagaaacttcattgtgatgtgtgcgttcaactcacagagtttaacctttcttttcatagagcagttaggaaacactctgtttgtaaactctgcaagtggatattcagacctctttgaggccttcgttggaaacgggatttcttcatactatgctagacagaagaattctcagtaacttccttgtgttgtgtgtattcaactcacagagttgaacgatcctttacacagagcggacttgaaacactcgttttgtggaatttgcaagtggagatttcagccgcgttgaggtcaatggtagaaaagggaatatcttcgtataaaaactagcacagaatgattctcagaaacttctttgtgatgtgtgcgttcaactcacagagtttaacctttcttttcatagatcagttaggaaacactctgtttgtaaactctgcaagtggatattcaaacctctttgaggccttcgttggaaacgggatttcttcatactatgctagacagaagaattcccagtaacttccttgtgttgtgtgcattcaactcacagagttgaacgttcccttagacagagcagatttgaaacactctatttgtgcaatttgcaagtgtagttttcaagctctttaaggtcaacggcagaaaaggaaatatcttcgtttcaaaactagacagaatcattctcagaaactgctctgcgatgtgtgcgttcaactctcagagtttaacttttcttttcattcagcagtttggaaacactctgtttgtgaagtctgcacgtggataacttgaccacttagaggccttcgttggaaacgggtttttttcatgtaaggctagacagaagtattctcagtaacttccttgtgttgtgtgtattcaactcacagagttgaacgatcctttacacagagcggacttgtaacactctttttgtggaatttgcaagtggagatttcagccgctttgaagtcaaagttagaaaaggaaataacttcctataaaaactagacagaacgattctcagaaactcctttgtgatgtgtgcattcaactcacagagtttaacctttcttttcatagagcagttaggaaacactctgtttgtaaagtgtgcaagtggatattcagacctctttgaggccttcgttggaaacgggatttcttcatattctgctagacagaagaattcccagtaacttccttgtgttgtgtgtgttcaactcacagagttgaactttcatttacacagagcagatttgaaaccctctttttgtggaatttgcaagtggagatttcaagggctttgtggccaaaggcagaaaaggaaatgtcttcgtttcaaaactagacagaatcattctcagaaactgcggcgtgatgtgtgcgttcaactctcagagtttaacttttcttttcattcagcggtttggaaacactctgtttgtaaagactgcacgtggatattttgaccacttagaggccttcgttggaaacgggtttttttcatgtaaggctagacagaagaattcccagtaacttccttgtgttgtgtacattcaactcacagcagttgaacgttcccttagacagagcagatttgaaacactctttttgtgcaattggcaaatggagatttcaagcgctttaaggtcaatggcaggaaaggaaatatcttcgtttcaaaactagacagaatcattcccaaaaactgcgttgtgatgtgttcgttaatctcacagagtttaacctttcttttcatagagcagttaggaaacagtctgtttgtaaattctgtaagtggatattctgacatcttgtggccttcgttggaaacgggatttcttcatattctgctagacagaataattctcagtaacttccttgtgttgtgtgtattcaactcacagagttgaaggatcctttacagagagcaggcttgaaacactctttttgtcgaatttgcaagtggagatttcagccgctttgaggtcaatggtagaatagaaaatatcttcttatagaaactagacagactgattctcagaaactcctttgtgatgtgtgcgttcaactcacagagtttaacctttcttttcatagagcagttaggaaacactctgtttgtaaagtctgcaagtggatattctgacctctttgaggccttcgttggaaacgggattttttcatataaggctagacagaagaattctcagtaacttccttgtgttgtgtgtattcaactgacagagttgaactttcatttcgagagagcagatttgaaacactgtttttgtggaatttgcaagtggagatttcaagcgcattggggccaaaggcagaaaaggaaatatcttcgtataaaaactagacagaatcattctcagaaactgctgcgtgatgtgtgcgttcaactctcagagtttaacttttcttttcattcagcggtttggaaacactctgtttgtaaagtctgcacgttgatattttgaccacttagaggccttcgttggaaacgggtttttttcatgtaaggctagacagaagatttctcagtaacttccttctgttgtgtttattcaactcacagagttgaatgatcctttacacagagcagacttgaaacactctttttgtggaatttgcagttggagatttcagccgctttgaggtcaatggtagaaaagtaaatatcttcgtataaagactagacagaatgattctcagaaactcctttgtgatgtgtgcgttcaactcacagagtttaacctttccgttcatagagcagttaggaaacactctgtttgtaaagtctgcaagtggatattcagacctccttgaggccttcgttggaaacgggatttcttcatattctgctagacagaagaattctcagtaacttccttgtgttgtgtgtattcaactcacagagttgaatgatcctttacacagagcagacttgaaacactctttttgtggaatttgcaagtggagatttcagccgctttgaggtcaatggtagaataggaaatatcttcctatagaaactagacagaatgattctcagaaactcctttgcgatgtgtgcgttcaactcacagagtttaaccgttcttttcatagagcagttaggaaacactctgtttgtaaagcctgcaagggg
